United States Patent Application Publication US 2026/0250697 A1, published August 27, 2026 (application 18/861,682).

The application's sequence listing, which the Patent Office published only in electronic form, follows.

SEQUENCE LISTING (334 sequences)

SEQ ID NO: 1 - DNA, 23 bp, Glycine max
  source 1..23: mol_type = genomic DNA
acctatttcaagtctcataccgg

SEQ ID NO: 2 - DNA, 23 bp, Glycine max
  source 1..23: mol_type = genomic DNA
gtccaccctagccctatatcagg

SEQ ID NO: 3 - DNA, 23 bp, Glycine max
  source 1..23: mol_type = genomic DNA
aagagggacggaggctagatcgg

SEQ ID NO: 4 - DNA, 23 bp, Glycine max
  source 1..23: mol_type = genomic DNA
ctagccaccacgactgtcgccgg

SEQ ID NO: 5 - DNA, 23 bp, Glycine max
  source 1..23: mol_type = genomic DNA
gaggctagatcggcaatgaccgg

SEQ ID NO: 6 - DNA, 23 bp, Glycine max
  source 1..23: mol_type = genomic DNA
gctagatcggaggctagcgaagg

SEQ ID NO: 7 - DNA, 23 bp, Glycine max
  source 1..23: mol_type = genomic DNA
cctcattcctcacgcagccaagg

SEQ ID NO: 8 - DNA, 23 bp, Glycine max
  source 1..23: mol_type = genomic DNA
tgtgttcgcggtctgtgtgcagg

SEQ ID NO: 9 - DNA, 23 bp, Glycine max
  source 1..23: mol_type = genomic DNA
gcttgggccctctgatctactgg

SEQ ID NO: 10 - DNA, 23 bp, Glycine max
  source 1..23: mol_type = genomic DNA
agctcgggactggcgatgcatgg

SEQ ID NO: 11 - DNA, 23 bp, Glycine max
  source 1..23: mol_type = genomic DNA
tgtatgcacacctattattccgg

SEQ ID NO: 12 - DNA, 23 bp, Glycine max
  source 1..23: mol_type = genomic DNA
taactcactcagtcttacgcggg

SEQ ID NO: 13 - DNA, 23 bp, Glycine max
  source 1..23: mol_type = genomic DNA
tcactcagtcttacgcgggcagg

SEQ ID NO: 14 - DNA, 23 bp, Glycine max
  source 1..23: mol_type = genomic DNA
cttacgcgggcaggtgtgcttgg

SEQ ID NO: 15 - DNA, 23 bp, Glycine max
  source 1..23: mol_type = genomic DNA
cggttggttctgtggaaacccgg

SEQ ID NO: 16 - DNA, 23 bp, Glycine max
  source 1..23: mol_type = genomic DNA
atggtctagccaaacccggttgg

SEQ ID NO: 17 - DNA, 23 bp, Glycine max
  source 1..23: mol_type = genomic DNA
ttcggtctggtgagctcaaccgg

SEQ ID NO: 18 - DNA, 23 bp, Glycine max
  source 1..23: mol_type = genomic DNA
ggactgcaggcacagagagctgg

SEQ ID NO: 19 - DNA, 23 bp, Glycine max
  source 1..23: mol_type = genomic DNA
tcgtagggtactcggactgcagg

SEQ ID NO: 20 - DNA, 23 bp, Glycine max
  source 1..23: mol_type = genomic DNA
ggccttggtcgtagggtactcgg

SEQ ID NO: 21 - DNA, 23 bp, Glycine max
  source 1..23: mol_type = genomic DNA
gtccgagtaccctacgaccaagg

SEQ ID NO: 22 - DNA, 23 bp, Glycine max
  source 1..23: mol_type = genomic DNA
atgtgtgatctccagaattcggg

SEQ ID NO: 23 - DNA, 23 bp, Glycine max
  source 1..23: mol_type = genomic DNA
agaccactggttctagctaatgg

SEQ ID NO: 24 - DNA, 23 bp, Glycine max
  source 1..23: mol_type = genomic DNA
tgtacggactttatgttgacagg

SEQ ID NO: 25 - DNA, 23 bp, Glycine max
  source 1..23: mol_type = genomic DNA
aagctacagtccacttgctccgg

SEQ ID NO: 26 - DNA, 23 bp, Glycine max
  source 1..23: mol_type = genomic DNA
cctacggggagccgaaaaacggg

SEQ ID NO: 27 - DNA, 23 bp, Glycine max
  source 1..23: mol_type = genomic DNA
cacacgcgcggagtaaaggtagg

SEQ ID NO: 28 - DNA, 23 bp, Glycine max
  source 1..23: mol_type = genomic DNA
ctacgtatatgacccctctcagg

SEQ ID NO: 29 - DNA, 23 bp, Glycine max
  source 1..23: mol_type = genomic DNA
aaatccgtcttgagacagcacgg

SEQ ID NO: 30 - DNA, 23 bp, Glycine max
  source 1..23: mol_type = genomic DNA
atcaccgtgctgtctcaagacgg

SEQ ID NO: 31 - DNA, 23 bp, Glycine max
  source 1..23: mol_type = genomic DNA
caaggcccgtgattgcaacatgg

SEQ ID NO: 32 - DNA, 23 bp, Glycine max
  source 1..23: mol_type = genomic DNA
tctcacccaaaaagacgccaggg

SEQ ID NO: 33 - DNA, 23 bp, Glycine max
  source 1..23: mol_type = genomic DNA
tccgtgaataattccatcgtcgg

SEQ ID NO: 34 - DNA, 23 bp, Glycine max
  source 1..23: mol_type = genomic DNA
accgacgatggaattattcacgg

SEQ ID NO: 35 - DNA, 23 bp, Glycine max
  source 1..23: mol_type = genomic DNA
tccgtattagctgtcactgccgg

SEQ ID NO: 36 - DNA, 23 bp, Glycine max
  source 1..23: mol_type = genomic DNA
attattcacggatttaagaccgg

SEQ ID NO: 37 - DNA, 23 bp, Glycine max
  source 1..23: mol_type = genomic DNA
tgccagtggcgacaatgagacgg

SEQ ID NO: 38 - DNA, 23 bp, Glycine max
  source 1..23: mol_type = genomic DNA
aaccgtctcattgtcgccactgg

SEQ ID NO: 39 - DNA, 23 bp, Glycine max
  source 1..23: mol_type = genomic DNA
gtgcttatactgttgccgagcgg

SEQ ID NO: 40 - DNA, 23 bp, Glycine max
  source 1..23: mol_type = genomic DNA
cctcccgaattccataagagagg

SEQ ID NO: 41 - DNA, 23 bp, Glycine max
  source 1..23: mol_type = genomic DNA
cctctcttatggaattcgggagg

SEQ ID NO: 42 - DNA, 23 bp, Glycine max
  source 1..23: mol_type = genomic DNA
tcctctattaggaatagaggcgg

SEQ ID NO: 43 - DNA, 23 bp, Glycine max
  source 1..23: mol_type = genomic DNA
acgaggattcgacccaacgaagg

SEQ ID NO: 44 - DNA, 23 bp, Glycine max
  source 1..23: mol_type = genomic DNA
ggtgtcgcggggatcggtttagg

SEQ ID NO: 45 - DNA, 23 bp, Glycine max
  source 1..23: mol_type = genomic DNA
atcccgacccaaacccacagtgg

SEQ ID NO: 46 - DNA, 23 bp, Glycine max
  source 1..23: mol_type = genomic DNA
acccatcggtattctcaagtggg

SEQ ID NO: 47 - DNA, 23 bp, Glycine max
  source 1..23: mol_type = genomic DNA
aacccatcggtattctcaagtgg

SEQ ID NO: 48 - DNA, 23 bp, Glycine max
  source 1..23: mol_type = genomic DNA
taatcacatgctagatctcccgg

SEQ ID NO: 49 - DNA, 23 bp, Glycine max
  source 1..23: mol_type = genomic DNA
gtggctactctaaacactcgagg

SEQ ID NO: 50 - DNA, 23 bp, Glycine max
  source 1..23: mol_type = genomic DNA
ctggggattgctactgacaccgg

SEQ ID NO: 51 - DNA, 23 bp, Glycine max
  source 1..23: mol_type = genomic DNA
tgacaccggcacattgctattgg

SEQ ID NO: 52 - DNA, 23 bp, Glycine max
  source 1..23: mol_type = genomic DNA
aggacaacccgcatgaaatcggg

SEQ ID NO: 53 - DNA, 23 bp, Glycine max
  source 1..23: mol_type = genomic DNA
tcgtctccgttcccaggattagg

SEQ ID NO: 54 - DNA, 23 bp, Glycine max
  source 1..23: mol_type = genomic DNA
attaatctctttagcgggatggg

SEQ ID NO: 55 - DNA, 23 bp, Glycine max
  source 1..23: mol_type = genomic DNA
gtggtagattccgtgactctagg

SEQ ID NO: 56 - DNA, 23 bp, Glycine max
  source 1..23: mol_type = genomic DNA
agctgcacttctcgtacgtacgg

SEQ ID NO: 57 - DNA, 23 bp, Glycine max
  source 1..23: mol_type = genomic DNA
caacatgctggtcagttcgcagg

SEQ ID NO: 58 - DNA, 23 bp, Glycine max
  source 1..23: mol_type = genomic DNA
gttgcgcgctctgcctagaatgg

SEQ ID NO: 59 - DNA, 23 bp, Glycine max
  source 1..23: mol_type = genomic DNA
attctaggcagagcgcgcaacgg

SEQ ID NO: 60 - DNA, 23 bp, Glycine max
  source 1..23: mol_type = genomic DNA
cggagcccagggtgagtcggtgg

SEQ ID NO: 61 - DNA, 23 bp, Glycine max
  source 1..23: mol_type = genomic DNA
acatggttccgtctctacctagg

SEQ ID NO: 62 - DNA, 23 bp, Glycine max
  source 1..23: mol_type = genomic DNA
aacccggcccagttcgaccgcgg

SEQ ID NO: 63 - DNA, 23 bp, Glycine max
  source 1..23: mol_type = genomic DNA
gagtaaaccgcggtcgaactggg

SEQ ID NO: 64 - DNA, 23 bp, Glycine max
  source 1..23: mol_type = genomic DNA
aaaccgcggtcgaactgggccgg

SEQ ID NO: 65 - DNA, 23 bp, Glycine max
  source 1..23: mol_type = genomic DNA
tattaggggtcgatcctactggg

SEQ ID NO: 66 - DNA, 23 bp, Glycine max
  source 1..23: mol_type = genomic DNA
gatcgacccctaataacatgggg

SEQ ID NO: 67 - DNA, 23 bp, Glycine max
  source 1..23: mol_type = genomic DNA
aacgggcatcgaatatattgcgg

SEQ ID NO: 68 - DNA, 23 bp, Glycine max
  source 1..23: mol_type = genomic DNA
agataatttcgggccggcgaagg

SEQ ID NO: 69 - DNA, 23 bp, Glycine max
  source 1..23: mol_type = genomic DNA
acaccctcctaacgaaacgttgg

SEQ ID NO: 70 - DNA, 23 bp, Glycine max
  source 1..23: mol_type = genomic DNA
agttatagatgactgcttgcggg

SEQ ID NO: 71 - DNA, 23 bp, Glycine max
  source 1..23: mol_type = genomic DNA
tcgtctactacatgcaactgcgg

SEQ ID NO: 72 - DNA, 23 bp, Glycine max
  source 1..23: mol_type = genomic DNA
cgttcacgtcgaactaaaacagg

SEQ ID NO: 73 - DNA, 23 bp, Glycine max
  source 1..23: mol_type = genomic DNA
gttactggggcacatacctatgg

SEQ ID NO: 74 - DNA, 23 bp, Glycine max
  source 1..23: mol_type = genomic DNA
tggtggccacgtgcttggggggg

SEQ ID NO: 75 - DNA, 23 bp, Glycine max
  source 1..23: mol_type = genomic DNA
ctttagttaggggtcccaggagg

SEQ ID NO: 76 - DNA, 23 bp, Glycine max
  source 1..23: mol_type = genomic DNA
acgtctcaatttgttcggtaggg

SEQ ID NO: 77 - DNA, 23 bp, Glycine max
  source 1..23: mol_type = genomic DNA
cgcgacgtgtgttacggcgaggg

SEQ ID NO: 78 - DNA, 23 bp, Glycine max
  source 1..23: mol_type = genomic DNA
gcgacgtgtgttacggcgagggg

SEQ ID NO: 79 - DNA, 23 bp, Glycine max
  source 1..23: mol_type = genomic DNA
taagggctgttccgtgtggcagg

SEQ ID NO: 80 - DNA, 23 bp, Glycine max
  source 1..23: mol_type = genomic DNA
cagctagaccctggccagcgtgg

SEQ ID NO: 81 - DNA, 23 bp, Glycine max
  source 1..23: mol_type = genomic DNA
gacttggcccagctagaccctgg

SEQ ID NO: 82 - DNA, 23 bp, Glycine max
  source 1..23: mol_type = genomic DNA
ccctgcggcccacgctggccagg

SEQ ID NO: 83 - DNA, 23 bp, Glycine max
  source 1..23: mol_type = genomic DNA
cctgcggcccacgctggccaggg

SEQ ID NO: 84 - DNA, 23 bp, Glycine max
  source 1..23: mol_type = genomic DNA
tcctcaacatgtgtcatgcccgg

SEQ ID NO: 85 - DNA, 23 bp, Glycine max
  source 1..23: mol_type = genomic DNA
atgcatcccaagcggctacccgg

SEQ ID NO: 86 - DNA, 23 bp, Glycine max
  source 1..23: mol_type = genomic DNA
tgcatcccaagcggctacccggg

SEQ ID NO: 87 - DNA, 23 bp, Glycine max
  source 1..23: mol_type = genomic DNA
ggtgctagagcccctggccatgg

SEQ ID NO: 88 - DNA, 23 bp, Glycine max
  source 1..23: mol_type = genomic DNA
attaatattaggcctatagcggg

SEQ ID NO: 89 - DNA, 23 bp, Glycine max
  source 1..23: mol_type = genomic DNA
ctgggaacaaaagctccatacgg

SEQ ID NO: 90 - DNA, 23 bp, Glycine max
  source 1..23: mol_type = genomic DNA
ttcgctttataccatccgtatgg

SEQ ID NO: 91 - DNA, 23 bp, Glycine max
  source 1..23: mol_type = genomic DNA
atactttaatgtggcgtagcggg

SEQ ID NO: 92 - DNA, 23 bp, Glycine max
  source 1..23: mol_type = genomic DNA
aatactttaatgtggcgtagcgg

SEQ ID NO: 93 - DNA, 23 bp, Glycine max
  source 1..23: mol_type = genomic DNA
acccttaccagtgtgattccagg

SEQ ID NO: 94 - DNA, 23 bp, Glycine max
  source 1..23: mol_type = genomic DNA
ttgtccagagcgggctgcactgg

SEQ ID NO: 95 - DNA, 23 bp, Glycine max
  source 1..23: mol_type = genomic DNA
tcacttgaaaccgtttcacccgg

SEQ ID NO: 96 - DNA, 23 bp, Glycine max
  source 1..23: mol_type = genomic DNA
gcaatttgacccgaatggcgcgg

SEQ ID NO: 97 - DNA, 23 bp, Glycine max
  source 1..23: mol_type = genomic DNA
ggtatggtaaaccctgccgtcgg

SEQ ID NO: 98 - DNA, 23 bp, Glycine max
  source 1..23: mol_type = genomic DNA
atagcactacataacaccgacgg

SEQ ID NO: 99 - DNA, 23 bp, Glycine max
  source 1..23: mol_type = genomic DNA
cactacataacaccgacggcagg

SEQ ID NO: 100 - DNA, 23 bp, Glycine max
  source 1..23: mol_type = genomic DNA
cttaaccggcccccactgcaagg

SEQ ID NO: 101 - DNA, 23 bp, Glycine max
  source 1..23: mol_type = genomic DNA
cttaaccttgcagtgggggccgg

SEQ ID NO: 102 - DNA, 23 bp, Glycine max
  source 1..23: mol_type = genomic DNA
ctgagtgcaagcgtacctaacgg

SEQ ID NO: 103 - DNA, 23 bp, Glycine max
  source 1..23: mol_type = genomic DNA
gggtgggtatatgcgggtatcgg

SEQ ID NO: 104 - DNA, 23 bp, Glycine max
  source 1..23: mol_type = genomic DNA
aatatgtgggttatttcgggcgg

SEQ ID NO: 105 - DNA, 23 bp, Glycine max
  source 1..23: mol_type = genomic DNA
atatgtgggttatttcgggcggg

SEQ ID NO: 106 - DNA, 23 bp, Glycine max
  source 1..23: mol_type = genomic DNA
ttacactgctgacgctaaggtgg

SEQ ID NO: 107 - DNA, 23 bp, Glycine max
  source 1..23: mol_type = genomic DNA
cacaccccaagacttcggcgagg

SEQ ID NO: 108 - DNA, 23 bp, Glycine max
  source 1..23: mol_type = genomic DNA
gcttatcaattcgattagaccgg

SEQ ID NO: 109 - DNA, 23 bp, Glycine max
  source 1..23: mol_type = genomic DNA
acacacagacagccgacagctgg

SEQ ID NO: 110 - DNA, 6767 bp, Streptococcus pyogenes
  source 1..6767: mol_type = genomic DNA
gggtttacttattttgtgggtatctatacttttattagatttttaatcaggctcctgatttctttttatttcgattgaattcctgaacttgtattattcagtagatcgaataaattataaaaagataaaatcataaaataatattttatcctatcaatcatattaaagcaatgaatatgtaaaattaatcttatctttattttaaaaaatcatataggtttagtatttttttaaaaataaagataggattagttttactattcactgcttattacttttaaaaaaatcataaaggtttagtatttttttaaaataaatataggaatagttttactattcactgctttaatagaaaaatagtttaaaatttaagatagttttaatcccagcatttgccacgtttgaacgtgagccgaaacgatgtcgttacattatcttaacctagctgaaacgatgtcgtcataatatcgccaaatgccaactggactacgtcgaacccacaaatcccacaaagcgcgtgaaatcaaatcgctcaaaccacaaaaaagaacaacgcgtttgttacacgctcaatcccacgcgagtagagcacagtaaccttcaaataagcgaatggggcataatcagaaatccgaaataaacctaggggcattatcggaaatgaaaagtagctcactcaatataaaaatctaggaaccctagttttcgttatcactctgtgctccctcgctctatttctcagtctctgtgtttgcggctgaggattccgaacgagtgaccttcttcgtttctcgcaaaggtaacagcctctgctcttgtctcttcgattcgatctatgcctgtctcttatttacgatgatgtttcttcggttatgtttttttatttatgctttatgctgttgatgttcggttgtttgtttcgctttgtttttgtggttcagttttttaggattcttttggtttttgaatcgattaatcggaagagattttcgagttatttggtgtgttggaggtgaatcttttttttgaggtcatagatctgttgtatttgtgttataaacatgcgactttgtatgattttttacgaggttatgatgttctggttgttttattatgaatctgttgagacagaaccatgatttttgttgatgttcgtttacactattaaaggtttgttttaacaggattaaaagttttttaagcatgttgaaggagtcttgtagatatgtaaccgtcgatagtttttttgtgggtttgttcacatgttatcaagcttaatcttttactatgtatgcgaccatatctggatccagcaaaggcgattttttaattccttgtgaaacttttgtaatatgaagttgaaattttgttattggtaaactataaatgtgtgaagttggagtatacctttaccttcttatttggctttgtgatagtttaatttatatgtattttgagttctgacttgtatttctttgaattgattctagtttaagtaatccatggcacctaaaaagaagaggaaagttatggacaaaaagtactccatagggctcgatatcggcacaaacagtgtggggtgggcagtcatcactgacgagtacaaggtcccctccaagaagttcaaggtcctcggcaatacagaccgccactccatcaagaagaacctcatcggagcactgttgttcgactccggagaaactgccgaagcaaccagactcaagaggaccgccagaagaaggtacacaaggcgcaagaacaggatctgctacctccaggagatcttcagtaacgagatggcaaaggtcgacgactctttcttccacaggctcgaggaatccttcctcgtcgaggaggacaagaagcatgagagacaccccatcttcggaaacatcgtcgacgaggtaagtttctgcttctacctttgatatatatataataattatcattaattagtagtaatataatatttcaaatatttttttcaaaataaaagaatgtagtatatagcaattgcttttctgtagtttataagtgtgtatattttaatttataacttttctaatatatgaccaaaacatggtgatgtgcaggtcgcctaccacgagaagtacccaaccatctaccacctgaggaagaagctcgtcgacagttccgacaaggctgacctcaggctcatctacctcgcactcgcccacatgattaagttcaggggccacttcctcatagagggagacctcaacccagacaactccgacgtcgacaaactcttcatccaactcgtgcagacctacaatcaactctttgaagagaacccaatccaagcctccggagtggatgctaaggctatattgtccgccaggctctccaaatcaagacgcctcgaaaacctcatcgcccagctcccaggggagaagaaaaatggactcttcgggaacctcatagccctgtcccttggactcacccctaacttcaaagcaaatttcgacctcgcagaggacgctaagcttcaactctccaaggacacctacgacgacgacctcgataacctcctcgcccaaatcggtgatcaatacgctgacctcttcctcgctgctaagaacctctccgacgccatactcctctccgacattctgagggtcaacaccgagatcacaaaggctcccttgtccgcctccatgattaaacgctacgacgaacaccaccaggacctcaccctcttgaaggcactggttagacagcagctccccgagaagtacaaggaaatcttcttcgaccaatcaaaaaacggctacgccggatacatcgacggaggagcatcccaggaagagttctacaagttcatcaaaccaattctcgaaaagatggacggaacagaggagctcttggtcaagctcaacagggaggacctcctcagaaagcagagaaccttcgacaacggcagtatcccccaccagatccaccttggagagttgcacgcaatcctcaggaggcaagaggacttctaccccttcctcaaggacaacagggagaagatcgagaagatccttacattccgcatcccctactacgtcggacctttggcaagaggaaactcccgcttcgcatggatgactcgcaagagtgaggaaaccatcaccccttggaacttcgaggaggtcgtcgataagggagcttcagcccagtccttcatcgagcgcatgaccaacttcgataaaaatctccccaatgaaaaagtcctccccaagcacagtctgctctacgagtacttcacagtctacaacgagctcaccaaggtcaagtacgtcaccgaaggcatgagaaaacccgccttcctcagtggcgagcagaagaaggcaatcgtggacttgctgttcaagaccaaccgcaaggtcacagtcaagcaattaaaagaggactacttcaagaaaatagagtgcttcgacagtgtcgagatctctggggtcgaggacaggttcaacgcatccttggggacctatcacgacctcctcaagatcattaaagacaaggacttcctcgacaacgaggagaacgaggacatactggaggacatcgtcctcaccctcactctctttgaggacagggagatgatagaggagcgcctcaaaacctacgcccacctcttcgacgacaaggtgatgaaacagctcaagaggcgcagatacaccggatggggtagactctccaggaagctgattaatggcatccgcgacaaacagtccggcaagaccatcctcgacttcctcaagagtgacggatacgccaaccgcaacttcatgcagctcatacacgacgactccctcaccttcaaggaggacatccaaaaagcccaagtctccggacagggagactcattgcacgaacacatcgccaacttggctggatctcctgctattaaaaagggcatcctccaaaccgtcaaggtggtcgacgaactcgtcaaggtcatgggtagacacaagcccgaaaatatcgtcatcgagatggcaagggagaaccagacaacccagaagggccaaaaaaactccagggagcgcatgaaacgcatcgaggagggaataaaggagctcgggtcccagatcctcaaggagcaccccgtcgaaaatactcaactccagaatgaaaagctctacctctactacctccaaaacggcagggatatgtacgtcgaccaagagctcgacattaatcgcctctccgactacgacgtcgatcacatcgtcccccagagtttcctcaaggacgactccatcgacaacaaggtcctcaccagatccgataaaaatcgcggaaagtccgacaacgtcccctctgaggaagtggttaagaagatgaaaaactactggagacagctcctcaacgcaaagctgatcacccagcgcaagttcgacaacctcacaaaggctgagagagggggactctctgagttggacaaggccggcttcatcaagagacaactcgtggaaacccgccagatcaccaagcatgtcgcacagattctcgactcccgcatgaatactaaatacgatgaaaatgacaagctcatcagggaggtcaaggtcatcaccctgaagtccaagctcgtctccgacttccgcaaggacttccagttctacaaggtccgcgagatcaacaactaccaccacgcccacgacgcatacctcaacgctgtggttggaacagcactcatcaagaagtaccccaagctcgagtccgagttcgtctacggcgactacaaggtctacgacgtcaggaagatgatcgccaagtccgagcaagagatcggaaaggccaccgcaaaatatttcttctactccaacataatgaacttcttcaaaaccgagatcaccctggctaacggagaaataaggaagaggcccctgatagaaaccaacggcgagacaggcgagattgtctgggacaaaggcagggacttcgcaaccgtcagaaaggtgctcagtatgcctcaggtcaacatagtcaaaaagaccgaagtccagactggaggattctccaaggagtccatcctccccaaaaggaactccgacaaactgatcgccaggaaaaaggactgggaccccaaaaaatatggcggcttcgactcccctactgttgcttacagtgtgctcgtcgtcgcaaaagtcgagaaggggaaatccaagaagctcaagtcagtgaaggagctcctcggcatcaccatcatggagaggtcctccttcgagaagaaccccatcgacttcctcgaggccaagggatataaggaggtcaagaaggacctcatcattaaactccccaagtactccctcttcgagctcgaaaacggacgcaagaggatgctcgcttcagctggtgaactccagaagggcaacgaactcgctttgccctctaaatacgtcaacttcctctacctcgcctcccactatgaaaagctcaagggctccccagaggacaacgagcagaagcaactcttcgtcgagaaccacaagcattacctcgacgagatcatcgagcagatctccgagttctccaagagagtcatcctcgctgacgcaaacctcgacaaggtcctcagtgcatataacaagcaccgcgacaaaccaataagggagcaggccgaaaatattatacacctgttcaccctcaccaacttgggagcaccagccgccttcaagtatttcgacaccaccatcgacagaaagcgctacacctccacaaaggaggtcctggacgccacacttatccaccagtccatcaccggcctctatgaaacacgcatcgacctctctcaattgggaggggacaagagaccaagagacagacacgatggagagcttggaggtagaaagagagcaaggtagctcgtctctgttatgcttaagaagttcaatgtttcgtttcatgtaaaactttggtggtttgtgttttggggccttgtataatccctgatgaataagtgttctactatgtttccgttcctgttatctctttctttctaatgacaagtcgaacttcttctttatcatcgcttcgtttttattatctgtgcttcttttgtttaatacgcctgcaaagtgactcgactctgtttagtgcagttctgcgaaacttgtaaatagtccaattgttggcctctagtaatagatgtagcgaaagtgttgagctgttgggttctaaggatggcttgaacatgttaatcttttaggttctgagtatgatgaacattcgttgttgctaagaaatgcctgtaatgtcccacaaatgtagaaaatggttcgtacctttgtccaagcattgatatgtctgatgagaggaaactgcaagatactgagcttggtttaacgaaggagaggcagtttcttccttccaaagcatttcatttgacaatgccttgatcatcttaagtagagtttctgttgtggaaagtttgaaactttgaagaaacgactctcaagtaaattgatgatcacaagtgaaagtgtatgttacataagtggatatttcaccctttttccatcaatcaaaacatcatatagtaatccattggtttatacaaacatcaaaatacatttacctctgaaatgaggaaaaaaatgcaaagagatttttgaaaatttccaacaaatggagagaaaaaaaaaaaacaaagaattaaatcaatcagtacatttataaaggttatgagacctatatgacacttattggtcaagtggcagccattccatttctagctctaattctggtaccgc

SEQ ID NO: 111 - DNA, 21 bp, Arabidopsis thaliana
  source 1..21: mol_type = genomic DNA
cctaaaaagaagaggaaagtt

SEQ ID NO: 112 - DNA, 57 bp, Agrobacterium tumefaciens
  source 1..57: mol_type = genomic DNA
aagagaccaagagacagacacgatggagagcttggaggtagaaagagagcaaggtag

SEQ ID NO: 113 - DNA, 439 bp, Glycine max
  source 1..439: mol_type = genomic DNA
ccgggtgtgatttagtataaagtgaagtaatggtcaaaagaaaaagtgtaaaacgaagtacctagtaataagtaatattgaacaaaataaatggtaaagtgtcagatatataaaataggctttaataaaaggaagaaaaaaaacaaacaaaaaataggttgcaatggggcagagcagagtcatcatgaagctagaaaggctaccgatagataaactatagttaattaaatacattaaaaaatacttggatctttctcttaccctgtttatattgagacctgaaacttgagagagatacactaatcttgccttgttgtttcattccctaacttacaggactcagcgcatgtcatgtggtctcgttccccatttaagtcccacaccgtctaaacttattaaattattaatgtttataactagatgcacaacaacaaagctt

SEQ ID NO: 114 - DNA, 548 bp, synthetic construct
  misc_feature 1..548: note = Guide sequence or cassette for donor insertion
  source 1..548: mol_type = other DNA
ccgggtgtgatttagtataaagtgaagtaatggtcaaaagaaaaagtgtaaaacgaagtacctagtaataagtaatattgaacaaaataaatggtaaagtgtcagatatataaaataggctttaataaaaggaagaaaaaaaacaaacaaaaaataggttgcaatggggcagagcagagtcatcatgaagctagaaaggctaccgatagataaactatagttaattaaatacattaaaaaatacttggatctttctcttaccctgtttatattgagacctgaaacttgagagagatacactaatcttgccttgttgtttcattccctaacttacaggactcagcgcatgtcatgtggtctcgttccccatttaagtcccacaccgtctaaacttattaaattattaatgtttataactagatgcacaacaacaaagcttgtccaccctagccctatatcgttttagagctagaaatagcaagttaaaataaggctagtccgttatcaacttgaaaaagtggcaccgagtcggtgctttttttgcggcc

SEQ ID NO: 115 - DNA, 451 bp, synthetic construct
  misc_feature 1..451: note = Guide sequence or cassette for donor insertion
  source 1..451: mol_type = other DNA
ccgggtgtgatttagtataaagtgaagtaatggtcaaaagaaaaagtgtaaaacgaagtacctagtaataagtaatattgaacaaaataaatggtaaagtgtcagatatataaaataggctttaataaaaggaagaaaaaaaacaaacaaaaaataggttgcaatggggcagagcagagtcatcatgaagctagaaaggctaccgatagataaactatagttaattaaatacattaaaaaatacttggatctttctcttaccctgtttatattgagacctgaaacttgagagagatacactaatcttgccttgttgtttcattccctaacttacaggactcagcgcatgtcatgtggtctcgttccccatttaagtcccacaccgtctaaacttattaaattattaatgtttataactagatgcacaacaacaaagcttttttttgcggcc

SEQ ID NO: 116 - DNA, 548 bp, synthetic construct
  misc_feature 1..548: note = Guide sequence or cassette for donor insertion
  source 1..548: mol_type = other DNA
ccgggtgtgatttagtataaagtgaagtaatggtcaaaagaaaaagtgtaaaacgaagtacctagtaataagtaatattgaacaaaataaatggtaaagtgtcagatatataaaataggctttaataaaaggaagaaaaaaaacaaacaaaaaataggttgcaatggggcagagcagagtcatcatgaagctagaaaggctaccgatagataaactatagttaattaaatacattaaaaaatacttggatctttctcttaccctgtttatattgagacctgaaacttgagagagatacactaatcttgccttgttgtttcattccctaacttacaggactcagcgcatgtcatgtggtctcgttccccatttaagtcccacaccgtctaaacttattaaattattaatgtttataactagatgcacaacaacaaagcttggactgcaggcacagagagcgttttagagctagaaatagcaagttaaaataaggctagtccgttatcaacttgaaaaagtggcaccgagtcggtgctttttttgcggcc

SEQ ID NO: 117 - DNA, 548 bp, synthetic construct
  misc_feature 1..548: note = Guide sequence or cassette for donor insertion
  source 1..548: mol_type = other DNA
ccgggtgtgatttagtataaagtgaagtaatggtcaaaagaaaaagtgtaaaacgaagtacctagtaataagtaatattgaacaaaataaatggtaaagtgtcagatatataaaataggctttaataaaaggaagaaaaaaaacaaacaaaaaataggttgcaatggggcagagcagagtcatcatgaagctagaaaggctaccgatagataaactatagttaattaaatacattaaaaaatacttggatctttctcttaccctgtttatattgagacctgaaacttgagagagatacactaatcttgccttgttgtttcattccctaacttacaggactcagcgcatgtcatgtggtctcgttccccatttaagtcccacaccgtctaaacttattaaattattaatgtttataactagatgcacaacaacaaagcttgtgtgtgatctccagaattcgttttagagctagaaatagcaagttaaaataaggctagtccgttatcaacttgaaaaagtggcaccgagtcggtgctttttttgcggcc

SEQ ID NO: 118 - DNA, 548 bp, synthetic construct
  misc_feature 1..548: note = Guide sequence or cassette for donor insertion
  source 1..548: mol_type = other DNA
ccgggtgtgatttagtataaagtgaagtaatggtcaaaagaaaaagtgtaaaacgaagtacctagtaataagtaatattgaacaaaataaatggtaaagtgtcagatatataaaataggctttaataaaaggaagaaaaaaaacaaacaaaaaataggttgcaatggggcagagcagagtcatcatgaagctagaaaggctaccgatagataaactatagttaattaaatacattaaaaaatacttggatctttctcttaccctgtttatattgagacctgaaacttgagagagatacactaatcttgccttgttgtttcattccctaacttacaggactcagcgcatgtcatgtggtctcgttccccatttaagtcccacaccgtctaaacttattaaattattaatgtttataactagatgcacaacaacaaagcttgtacgtatatgacccctctcgttttagagctagaaatagcaagttaaaataaggctagtccgttatcaacttgaaaaagtggcaccgagtcggtgctttttttgcggcc

SEQ ID NO: 119 - DNA, 548 bp, synthetic construct
  misc_feature 1..548: note = Guide sequence or cassette for donor insertion
  source 1..548: mol_type = other DNA
ccgggtgtgatttagtataaagtgaagtaatggtcaaaagaaaaagtgtaaaacgaagtacctagtaataagtaatattgaacaaaataaatggtaaagtgtcagatatataaaataggctttaataaaaggaagaaaaaaaacaaacaaaaaataggttgcaatggggcagagcagagtcatcatgaagctagaaaggctaccgatagataaactatagttaattaaatacattaaaaaatacttggatctttctcttaccctgtttatattgagacctgaaacttgagagagatacactaatcttgccttgttgtttcattccctaacttacaggactcagcgcatgtcatgtggtctcgttccccatttaagtcccacaccgtctaaacttattaaattattaatgtttataactagatgcacaacaacaaagcttgaaggcccgtgattgcaacagttttagagctagaaatagcaagttaaaataaggctagtccgttatcaacttgaaaaagtggcaccgagtcggtgctttttttgcggcc

SEQ ID NO: 120 - DNA, 548 bp, synthetic construct
  misc_feature 1..548: note = Guide sequence or cassette for donor insertion
  source 1..548: mol_type = other DNA
ccgggtgtgatttagtataaagtgaagtaatggtcaaaagaaaaagtgtaaaacgaagtacctagtaataagtaatattgaacaaaataaatggtaaagtgtcagatatataaaataggctttaataaaaggaagaaaaaaaacaaacaaaaaataggttgcaatggggcagagcagagtcatcatgaagctagaaaggctaccgatagataaactatagttaattaaatacattaaaaaatacttggatctttctcttaccctgtttatattgagacctgaaacttgagagagatacactaatcttgccttgttgtttcattccctaacttacaggactcagcgcatgtcatgtggtctcgttccccatttaagtcccacaccgtctaaacttattaaattattaatgtttataactagatgcacaacaacaaagcttgtgcttatactgttgccgaggttttagagctagaaatagcaagttaaaataaggctagtccgttatcaacttgaaaaagtggcaccgagtcggtgctttttttgcggcc

SEQ ID NO: 121 - DNA, 548 bp, synthetic construct
  misc_feature 1..548: note = Guide sequence or cassette for donor insertion
  source 1..548: mol_type = other DNA
ccgggtgtgatttagtataaagtgaagtaatggtcaaaagaaaaagtgtaaaacgaagtacctagtaataagtaatattgaacaaaataaatggtaaagtgtcagatatataaaataggctttaataaaaggaagaaaaaaaacaaacaaaaaataggttgcaatggggcagagcagagtcatcatgaagctagaaaggctaccgatagataaactatagttaattaaatacattaaaaaatacttggatctttctcttaccctgtttatattgagacctgaaacttgagagagatacactaatcttgccttgttgtttcattccctaacttacaggactcagcgcatgtcatgtggtctcgttccccatttaagtcccacaccgtctaaacttattaaattattaatgtttataactagatgcacaacaacaaagcttggtgtcgcggggatcggtttgttttagagctagaaatagcaagttaaaataaggctagtccgttatcaacttgaaaaagtggcaccgagtcggtgctttttttgcggcc

SEQ ID NO: 122 - DNA, 4562 bp, synthetic construct
  misc_feature 1..4562: note = Guide sequence or cassette for donor insertion
  source 1..4562: mol_type = other DNA
ctccaatctttaaagtctaatattaaaataaatggcattttaaatcttaatgattaatttctttgaataaaaataaaatgtaaataaataaacaaaataaataaaaataatgttagacttggcaattttagcctaacttaattagttgacctgaacaaaccataattagaacttatataattctaaatatgtagtcccaaaaaggacatgaatatataggtttaatttgatgggacctattgggctaggttgggctagtaaaatattgactcggtcttataagttattatgttatatttttttatcaatttatatatgtttctttagaaatttgtatattaaatatatttaattttgattgtttatttatttttaattagcgataatttgatacttggcttgttggcctgattcgagctagttaccctatgaggtgacatgaagcgctcacggttactatgacggttagcttcacgactgttggtggcagtagcgtacgacttagctatagttccggacttaccataacttcgtatagcatacattatacgaagttatatcaggatattcttgtttaagatgttgaactctatggaggtttgtatgaactgatgatctaggaccggataagttcccttcttcatagcgaacttattcaaagaatgttttgtgtatcattcttgttacattgttattaatgaaaaaatattattggtcattggactgaacacgagtgttaaatatggaccaggccccaaataagatccattgatatatgaattaaataacaagaataaatcgagtcaccaaaccacttgccttttttaacgagacttgttcaccaacttgatacaaaagtcattatcctatgcaaatcaataatcatacaaaaatatccaataacactaaaaaattaaaagaaatggataatttcacaatatgttatacgataaagaagttacttttccaagaaattcactgattttataagcccacttgcattagataaatggcaaaaaaaaacaaaaaggaaaagaaataaagcacgaagaattctagaaaatacgaaatacgcttcaatgcagtgggacccacggttcaattattgccaattttcagctccaccgtatatttaaaaaataaaacgataatgctaaaaaaatataaatcgtaacgatcgttaaatctcaacggctggatcttatgacgaccgttagaaattgtggttgtcgacgagtcagtaataaacggcgtcaaagtggttgcagccggcacacacgagtcgtgtttatcaactcaaagcacaaatacttttcctcaacctaaaaataaggcaattagccaaaaacaactttgcgtgtaaacaacgctcaatacacgtgtcattttattattagctattgcttcaccgccttagctttctcgtgacctagtcgtcctcgtcttttcttcttcttcttctataaaacaatacccaaagagctcttcttcttcacaattcagatttcaatttctcaaaatcttaaaaactttctctcaattctctctaccgtgatcaaggtaaatttctgtgttccttattctctcaaaatcttcgattttgttttcgttcgatcccaatttcgtatatgttctttggtttagattctgttaatcttagatcgaagacgattttctgggtttgatcgttagatatcatcttaattctcgattagggtttcatagatatcatccgatttgttcaaataatttgagttttgtcgaataattactcttcgatttgtgatttctatctagatctggtgttagtttctagtttgtgcgatcgaatttgtcgattaatctgagtttttctgattaacaggtcgactttaacttagcctagcgaagttcctattccgaagttcctattctctagaaagtataggaacttcagatccaccgggatccccgatcatgcaaaaactcattaactcagtgcaaaactatgcctggggcagcaaaacggcgttgactgaactttatggtatggaaaatccgtccagccagccgatggccgagctgtggatgggcgcacatccgaaaagcagttcacgagtgcagaatgccgccggagatatcgtttcactgcgtgatgtgattgagagtgataaatcgactctgctcggagaggccgttgccaaacgctttggcgaactgcctttcctgttcaaagtattatgcgcagcacagccactctccattcaggttcatccaaacaaacacaattctgaaatcggttttgccaaagaaaatgccgcaggtatcccgatggatgccgccgagcgtaactataaagatcctaaccacaagccggagctggtttttgcgctgacgcctttccttgcgatgaacgcgtttcgtgaattttccgagattgtctccctactccagccggtcgcaggtgcacatccggcgattgctcactttttacaacagcctgatgccgaacgtttaagcgaactgttcgccagcctgttgaatatgcagggtgaagaaaaatcccgcgcgctggcgattttaaaatcggccctcgatagccagcagggtgaaccgtggcaaacgattcgtttaatttctgaattttacccggaagacagcggtctgttctccccgctattgctgaatgtggtgaaattgaaccctggcgaagcgatgttcctgttcgctgaaacaccgcacgcttacctgcaaggcgtggcgctggaagtgatggcaaactccgataacgtgctgcgtgcgggtctgacgcctaaatacattgatattccggaactggttgccaatgtgaaattcgaagccaaaccggctaaccagttgttgacccagccggtgaaacaaggtgcagaactggacttcccgattccagtggatgattttgccttctcgctgcatgaccttagtgataaagaaaccaccattagccagcagagtgccgccattttgttctgcgtcgaaggcgatgcaacgttgtggaaaggttctcagcagttacagcttaaaccgggtgaatcagcgtttattgccgccaacgaatcaccggtgactgtcaaaggccacggccgtttagcgcgtgtttacaacaagctgtaaaaacttatctctgttatgaatcagaagaagttcatgtctcgtttcatttaaaactttggtggtttgtgttttggggccttgtaaagcccctgatgaataattgttcaactatgtttccgttcctgtgttatacctttctttctaatgagtaatgacatcaaacttcttctgtattgaaattatgtccttgtgagtctctttatcatcgtttcgtctttacattatatgtgctacttttgtctaatgagcctgaaaagtggctccaatggtacgcactggaagatttgttggcttctggtagatatagcgacagtgttgagcttgtaatatcatgtctcttattgctaaattagttcctttcttaacagaaaccttcaaagtttttgtttttgttttcatttacctaatgtacacatacgctggccatgactaacaacatgtccaggcttagagcatatttttttctagcttaaattgttaacttgtcattcagtaaaatccgagaattgtgaagctctaattgaagctaattcgttttataaagtcagttaaaaagtatactaaattatccaacttttcttcaaaatctcaaaattctatgacaaaacgatagtctttgtttatgtcagtaccacaaagaggtggaaaaaaacaccaaaaaaacaataagcaaactatacactgagaagaaaaataaaagagagctcaatagatgttttatactaacggtagattagatcaaagatccaagctttactctacatagagcagaacccagaatcccttcatatctcttttattctagcaccgataatctactgaaaagaagacacttagagctctgtctctttgtcaaagaagtcccagccgtcatccagaagctccttacgttcattaacagagaagttcctattccgaagttcctattcttcaaaaagtataggaacttctgattccgatgacttcgtaggttcctagctcaagccgctcgtgtccaagcgtcacttacgattagctaatgattacatagggctagggtggaccacaaaaattataatcgtaccgagacaacctgatttacaccctctaaattgaaatatgtgataaaatagaaatgaaaagtttgagtcctcacttttattcaggtaattaaaatgaaataaaaattaagagacaataactcatttctatgttaaaaatcgtcataggacaatgtcatattttgagttatgcttatcggtttgagatgctttgtgtcattaaaaagcttagagaaaaatttataacttatatcactactgtgtaaatctaaattaactattatcttgttaaaaaataactaaaaagtaggctattttatcattgtaagaactcgtgtgccatattccttttgctctcttcttccattctcttcctttcacttttttctg

SEQ ID NO: 123 - DNA, 4510 bp, synthetic construct
  misc_feature 1..4510: note = Guide sequence or cassette for donor insertion
  source 1..4510: mol_type = other DNA
cgaaccaatgataaaattgctttaaaatcaactttgcaccaatggtatctactagttttttagttttgctgccttggtctgtgaattgtaccataaatttcctatttataggtttcattttttttctcttaatttaaattaaattagtgtttaaatctgtttgttattttaaattttaaagtattaatgaatttttcttaataaaataatattaattttatatttacatataataaatttatatatataattttaaatttttaatatatatcagactaattactacctcatcgattgaatcacttacctacaaatctactatttgaattaggtcaatgataggaacagtttttataacattgctttaaacattatgattttgaaagggaggaggcatattgtctacgcatgtttctaactcactcagtcttacgcgatcaggatattcttgtttaagatgttgaactctatggaggtttgtatgaactgatgatctaggaccggataagttcccttcttcatagcgaacttattcaaagaatgttttgtgtatcattcttgttacattgttattaatgaaaaaatattattggtcattggactgaacacgagtgttaaatatggaccaggccccaaataagatccattgatatatgaattaaataacaagaataaatcgagtcaccaaaccacttgccttttttaacgagacttgttcaccaacttgatacaaaagtcattatcctatgcaaatcaataatcatacaaaaatatccaataacactaaaaaattaaaagaaatggataatttcacaatatgttatacgataaagaagttacttttccaagaaattcactgattttataagcccacttgcattagataaatggcaaaaaaaaacaaaaaggaaaagaaataaagcacgaagaattctagaaaatacgaaatacgcttcaatgcagtgggacccacggttcaattattgccaattttcagctccaccgtatatttaaaaaataaaacgataatgctaaaaaaatataaatcgtaacgatcgttaaatctcaacggctggatcttatgacgaccgttagaaattgtggttgtcgacgagtcagtaataaacggcgtcaaagtggttgcagccggcacacacgagtcgtgtttatcaactcaaagcacaaatacttttcctcaacctaaaaataaggcaattagccaaaaacaactttgcgtgtaaacaacgctcaatacacgtgtcattttattattagctattgcttcaccgccttagctttctcgtgacctagtcgtcctcgtcttttcttcttcttcttctataaaacaatacccaaagagctcttcttcttcacaattcagatttcaatttctcaaaatcttaaaaactttctctcaattctctctaccgtgatcaaggtaaatttctgtgttccttattctctcaaaatcttcgattttgttttcgttcgatcccaatttcgtatatgttctttggtttagattctgttaatcttagatcgaagacgattttctgggtttgatcgttagatatcatcttaattctcgattagggtttcatagatatcatccgatttgttcaaataatttgagttttgtcgaataattactcttcgatttgtgatttctatctagatctggtgttagtttctagtttgtgcgatcgaatttgtcgattaatctgagtttttctgattaacaggtcgactttaacttagcctagcgaagttcctattccgaagttcctattctctagaaagtataggaacttcagatccaccgggatccccgatcatgcagaagctcatcaactctgtgcagaactacgcctggggctctaagaccgccttgaccgagttgtacgggatggagaacccttcctcacagcctatggccgagttgtggatgggtgctcaccctaagtcctcctccagagtgcagaacgctgctggagacattgtctccctcagagacgtgatcgagtccgacaagtccaccctgctgggagaggccgtcgctaagagattcggtgagttgcccttcttgttcaaggtcctctgcgctgctcagcccttgtctatccaagtgcaccctaacaagcacaactccgagatcggattcgccaaggagaacgctgctggcatccctatggacgcagctgagcgtaactacaaagaccctaaccacaagcccgagttggtgttcgctctcacccctttcttggccatgaacgctttccgcgagttctctgagattgtgtcactcctccagcccgttgctggtgctcaccctgctatcgctcacttcttgcagcagcctgacgctgagaggctctcagagctgttcgcttccctcctcaacatgcaaggcgaagagaagtccagagccctcgccatcctgaagtctgccctcgactctcagcagggagagccctggcagactattcgcctgatttccgagttctacccagaggactccgggttgttctctcccttgttgctcaacgtggtgaagctgaacccaggcgaggccatgttcttgttcgccgagactcctcacgcctacctccaaggagtggccctggaggtcatggccaactctgacaacgtccttagagctggccttactcctaaatacatcgacattcccgagctggtggccaacgtgaagttcgaggccaagcctgctaaccagttgctcacccagcccgttaagcagggagctgaactcgacttccctatccctgttgacgacttcgccttctccttgcacgacctctctgacaaggagactaccatatcccagcagtccgctgctatcctgttctgcgtggagggagacgctaccctgtggaaaggatctcagcagcttcagctgaagcctggagagtcagctttcattgctgccaacgagtcacctgtgactgtgaagggccacgggaggctcgccagagtctacaacaagttgtagaaacttatctctgttatgaatcagaagaagttcatgtctcgtttcatttaaaactttggtggtttgtgttttggggccttgtaaagcccctgatgaataattgttcaactatgtttccgttcctgtgttatacctttctttctaatgagtaatgacatcaaacttcttctgtattgaaattatgtccttgtgagtctctttatcatcgtttcgtctttacattatatgtgctacttttgtctaatgagcctgaaaagtggctccaatggtacgcactggaagatttgttggcttctggtagatatagcgacagtgttgagcttgtaatatcatgtctcttattgctaaattagttcctttcttaacagaaaccttcaaagtttttgtttttgttttcatttacctaatgtacacatacgctggccatgactaacaacatgtccaggcttagagcatatttttttctagcttaaattgttaacttgtcattcagtaaaatccgagaattgtgaagctctaattgaagctaattcgttttataaagtcagttaaaaagtatactaaattatccaacttttcttcaaaatctcaaaattctatgacaaaacgatagtctttgtttatgtcagtaccacaaagaggtggaaaaaaacaccaaaaaaacaataagcaaactatacactgagaagaaaaataaaagagagctcaatagatgttttatactaacggtagattagatcaaagatccaagctttactctacatagagcagaacccagaatcccttcatatctcttttattctagcaccgataatctactgaaaagaagacacttagagctctgtctctttgtcaaagaagtcccagccgtcatccagaagctccttacgttcattaacagatcccagccgtcatccagaagctccttacgttcattaacagagaagttcctattccgaagttcctattcttcaaaaagtataggaacttctgattccgatgacttcgtaggttcctagctcaagccgctcgtgtccaagcgtcacttacgattagctaatgattacggcatctaggaccgactagggcaggtgtgcttggtcggagttttctgtttatgttaagtggtcttctgaactttttcatccgcgcattgtgaacatattgcagtgtagactgtagaaccgttaacacctttcacgtggttgacaagttgtctgctttctagtaattttctctcttcaattcaacctcatccttgtactacatagtatttcgtggatcgtctaatctttgattctttccctcttggccaaatgttgttactaactcaaacgtatgggggacatatatgtcaaacagtttctatataacccaccgtccattttcaaactatatactatatttcaattaaaaatcgtacagtacttctcttcatatatagttttagtctgcgtttataaaagaaaaagtaaatcaaagcataaagtttttaacatc

SEQ ID NO: 124 - DNA, 4606 bp, synthetic construct
  misc_feature 1..4606: note = Guide sequence or cassette for donor insertion
  source 1..4606: mol_type = other DNA
gagtcacatgcatgagcagtcaaatagtaaaatcgatccgattatgtaattggattccgattgaaccggttgagctcaccagaccgaaccgaataactaaggtttatattctttaagttatatatttttttatttaatgtataatatattttttttgcggttaggattttctacagacacttttttgacaatagagaatctatcacaagaacaaattatattcaatatgaaatacttctccttgatatgcttaattataacatgaagatgaaaccaaatcatgattttgataaaaaaacaaaaacaaaaacaaaaataaaatctttatgaatggttaggctatatatcttcaagagttgacacacatagacctagggcccatgaagcattctcagttctcaacgttgctgtccagttcccagcttcgagctagttaccctatgaggtgacatgaagcgctcacggttactatgacggttagcttcacgactgttggtggcagtagcgtacgacttagctatagttccggacttaccataacttcgtatagcatacattatacgaagttatatcaggatattcttgtttaagatgttgaactctatggaggtttgtatgaactgatgatctaggaccggataagttcccttcttcatagcgaacttattcaaagaatgttttgtgtatcattcttgttacattgttattaatgaaaaaatattattggtcattggactgaacacgagtgttaaatatggaccaggccccaaataagatccattgatatatgaattaaataacaagaataaatcgagtcaccaaaccacttgccttttttaacgagacttgttcaccaacttgatacaaaagtcattatcctatgcaaatcaataatcatacaaaaatatccaataacactaaaaaattaaaagaaatggataatttcacaatatgttatacgataaagaagttacttttccaagaaattcactgattttataagcccacttgcattagataaatggcaaaaaaaaacaaaaaggaaaagaaataaagcacgaagaattctagaaaatacgaaatacgcttcaatgcagtgggacccacggttcaattattgccaattttcagctccaccgtatatttaaaaaataaaacgataatgctaaaaaaatataaatcgtaacgatcgttaaatctcaacggctggatcttatgacgaccgttagaaattgtggttgtcgacgagtcagtaataaacggcgtcaaagtggttgcagccggcacacacgagtcgtgtttatcaactcaaagcacaaatacttttcctcaacctaaaaataaggcaattagccaaaaacaactttgcgtgtaaacaacgctcaatacacgtgtcattttattattagctattgcttcaccgccttagctttctcgtgacctagtcgtcctcgtcttttcttcttcttcttctataaaacaatacccaaagagctcttcttcttcacaattcagatttcaatttctcaaaatcttaaaaactttctctcaattctctctaccgtgatcaaggtaaatttctgtgttccttattctctcaaaatcttcgattttgttttcgttcgatcccaatttcgtatatgttctttggtttagattctgttaatcttagatcgaagacgattttctgggtttgatcgttagatatcatcttaattctcgattagggtttcatagatatcatccgatttgttcaaataatttgagttttgtcgaataattactcttcgatttgtgatttctatctagatctggtgttagtttctagtttgtgcgatcgaatttgtcgattaatctgagtttttctgattaacaggtcgactttaacttagcctagcgaagttcctattccgaagttcctattctctagaaagtataggaacttcagatccaccgggatccccgatcatgcaaaaactcattaactcagtgcaaaactatgcctggggcagcaaaacggcgttgactgaactttatggtatggaaaatccgtccagccagccgatggccgagctgtggatgggcgcacatccgaaaagcagttcacgagtgcagaatgccgccggagatatcgtttcactgcgtgatgtgattgagagtgataaatcgactctgctcggagaggccgttgccaaacgctttggcgaactgcctttcctgttcaaagtattatgcgcagcacagccactctccattcaggttcatccaaacaaacacaattctgaaatcggttttgccaaagaaaatgccgcaggtatcccgatggatgccgccgagcgtaactataaagatcctaaccacaagccggagctggtttttgcgctgacgcctttccttgcgatgaacgcgtttcgtgaattttccgagattgtctccctactccagccggtcgcaggtgcacatccggcgattgctcactttttacaacagcctgatgccgaacgtttaagcgaactgttcgccagcctgttgaatatgcagggtgaagaaaaatcccgcgcgctggcgattttaaaatcggccctcgatagccagcagggtgaaccgtggcaaacgattcgtttaatttctgaattttacccggaagacagcggtctgttctccccgctattgctgaatgtggtgaaattgaaccctggcgaagcgatgttcctgttcgctgaaacaccgcacgcttacctgcaaggcgtggcgctggaagtgatggcaaactccgataacgtgctgcgtgcgggtctgacgcctaaatacattgatattccggaactggttgccaatgtgaaattcgaagccaaaccggctaaccagttgttgacccagccggtgaaacaaggtgcagaactggacttcccgattccagtggatgattttgccttctcgctgcatgaccttagtgataaagaaaccaccattagccagcagagtgccgccattttgttctgcgtcgaaggcgatgcaacgttgtggaaaggttctcagcagttacagcttaaaccgggtgaatcagcgtttattgccgccaacgaatcaccggtgactgtcaaaggccacggccgtttagcgcgtgtttacaacaagctgtaaaaacttatctctgttatgaatcagaagaagttcatgtctcgtttcatttaaaactttggtggtttgtgttttggggccttgtaaagcccctgatgaataattgttcaactatgtttccgttcctgtgttatacctttctttctaatgagtaatgacatcaaacttcttctgtattgaaattatgtccttgtgagtctctttatcatcgtttcgtctttacattatatgtgctacttttgtctaatgagcctgaaaagtggctccaatggtacgcactggaagatttgttggcttctggtagatatagcgacagtgttgagcttgtaatatcatgtctcttattgctaaattagttcctttcttaacagaaaccttcaaagtttttgtttttgttttcatttacctaatgtacacatacgctggccatgactaacaacatgtccaggcttagagcatatttttttctagcttaaattgttaacttgtcattcagtaaaatccgagaattgtgaagctctaattgaagctaattcgttttataaagtcagttaaaaagtatactaaattatccaacttttcttcaaaatctcaaaattctatgacaaaacgatagtctttgtttatgtcagtaccacaaagaggtggaaaaaaacaccaaaaaaacaataagcaaactatacactgagaagaaaaataaaagagagctcaatagatgttttatactaacggtagattagatcaaagatccaagctttactctacatagagcagaacccagaatcccttcatatctcttttattctagcaccgataatctactgaaaagaagacacttagagctctgtctctttgtcaaagaagtcccagccgtcatccagaagctccttacgttcattaacagagaagttcctattccgaagttcctattcttcaaaaagtataggaacttctgattccgatgacttcgtaggttcctagctcaagccgctcgtgtccaagcgtcacttacgattagctaatgattacctctgtgcctgcagtccgagtaccctacgaccaaggcccagcatgtttttaaaatgttggagttggagatgctattatataaaatgtttggtaaaggtatgttttcaaaattgtaatggtgattgagtttgtttggatttaagttggaaatataaacacacaatagataatagtaagttaaaagtataataattttataaccgtacgtttgtaatcttgtgtccaaacacatctagaattggtcaagtggcaaagtctggcgtgcgtaggtgcaactctttacgcacggtgccacagtgtttcttaaagccttggatgtaatactaaaataattaacggtacagatcgtacatgtgtaacatgtagaaaagacattcaataacaagctttttttaagagtcttcaattttctctctgatccttccccttcttcatg

SEQ ID NO: 125 - DNA, 4653 bp, synthetic construct
  misc_feature 1..4653: note = Guide sequence or cassette for donor insertion
  source 1..4653: mol_type = other DNA
tgatagaataaaaataagactaactaacatgagtataagataaacgtttatcatctttttttatttctcatcagtaatcttaattcttaagtgatattttattaaaatatatatatttattccaaaagtatatctttggaactatgaattatagttccatagatacattctcgaaataggtatatgtaattctagacatacatttctggaaagtaaaaggaatgtatttctttaagaaaaaggatataatgtgtaattgagaggtagaaagggggataggggtgtaaatagcaagattcttgcagaaataagataaacccaaccacatactacacatttttttgggttgtgattgcttttttgggtcgtaagcaattgagctttgacctaggcctgctgtctgaataaatggcccataggtcagattggcagagccttgcttgcgtatgtgtgatctccagaatcgagctagttaccctatgaggtgacatgaagcgctcacggttactatgacggttagcttcacgactgttggtggcagtagcgtacgacttagctatagttccggacttaccataacttcgtatagcatacattatacgaagttatatcaggatattcttgtttaagatgttgaactctatggaggtttgtatgaactgatgatctaggaccggataagttcccttcttcatagcgaacttattcaaagaatgttttgtgtatcattcttgttacattgttattaatgaaaaaatattattggtcattggactgaacacgagtgttaaatatggaccaggccccaaataagatccattgatatatgaattaaataacaagaataaatcgagtcaccaaaccacttgccttttttaacgagacttgttcaccaacttgatacaaaagtcattatcctatgcaaatcaataatcatacaaaaatatccaataacactaaaaaattaaaagaaatggataatttcacaatatgttatacgataaagaagttacttttccaagaaattcactgattttataagcccacttgcattagataaatggcaaaaaaaaacaaaaaggaaaagaaataaagcacgaagaattctagaaaatacgaaatacgcttcaatgcagtgggacccacggttcaattattgccaattttcagctccaccgtatatttaaaaaataaaacgataatgctaaaaaaatataaatcgtaacgatcgttaaatctcaacggctggatcttatgacgaccgttagaaattgtggttgtcgacgagtcagtaataaacggcgtcaaagtggttgcagccggcacacacgagtcgtgtttatcaactcaaagcacaaatacttttcctcaacctaaaaataaggcaattagccaaaaacaactttgcgtgtaaacaacgctcaatacacgtgtcattttattattagctattgcttcaccgccttagctttctcgtgacctagtcgtcctcgtcttttcttcttcttcttctataaaacaatacccaaagagctcttcttcttcacaattcagatttcaatttctcaaaatcttaaaaactttctctcaattctctctaccgtgatcaaggtaaatttctgtgttccttattctctcaaaatcttcgattttgttttcgttcgatcccaatttcgtatatgttctttggtttagattctgttaatcttagatcgaagacgattttctgggtttgatcgttagatatcatcttaattctcgattagggtttcatagatatcatccgatttgttcaaataatttgagttttgtcgaataattactcttcgatttgtgatttctatctagatctggtgttagtttctagtttgtgcgatcgaatttgtcgattaatctgagtttttctgattaacaggtcgactttaacttagcctagcgaagttcctattccgaagttcctattctctagaaagtataggaacttcagatccaccgggatccccgatcatgcagaagctcatcaactctgtgcagaactacgcctggggctctaagaccgccttgaccgagttgtacgggatggagaacccttcctcacagcctatggccgagttgtggatgggtgctcaccctaagtcctcctccagagtgcagaacgctgctggagacattgtctccctcagagacgtgatcgagtccgacaagtccaccctgctgggagaggccgtcgctaagagattcggtgagttgcccttcttgttcaaggtcctctgcgctgctcagcccttgtctatccaagtgcaccctaacaagcacaactccgagatcggattcgccaaggagaacgctgctggcatccctatggacgcagctgagcgtaactacaaagaccctaaccacaagcccgagttggtgttcgctctcacccctttcttggccatgaacgctttccgcgagttctctgagattgtgtcactcctccagcccgttgctggtgctcaccctgctatcgctcacttcttgcagcagcctgacgctgagaggctctcagagctgttcgcttccctcctcaacatgcaaggcgaagagaagtccagagccctcgccatcctgaagtctgccctcgactctcagcagggagagccctggcagactattcgcctgatttccgagttctacccagaggactccgggttgttctctcccttgttgctcaacgtggtgaagctgaacccaggcgaggccatgttcttgttcgccgagactcctcacgcctacctccaaggagtggccctggaggtcatggccaactctgacaacgtccttagagctggccttactcctaaatacatcgacattcccgagctggtggccaacgtgaagttcgaggccaagcctgctaaccagttgctcacccagcccgttaagcagggagctgaactcgacttccctatccctgttgacgacttcgccttctccttgcacgacctctctgacaaggagactaccatatcccagcagtccgctgctatcctgttctgcgtggagggagacgctaccctgtggaaaggatctcagcagcttcagctgaagcctggagagtcagctttcattgctgccaacgagtcacctgtgactgtgaagggccacgggaggctcgccagagtctacaacaagttgtagaaacttatctctgttatgaatcagaagaagttcatgtctcgtttcatttaaaactttggtggtttgtgttttggggccttgtaaagcccctgatgaataattgttcaactatgtttccgttcctgtgttatacctttctttctaatgagtaatgacatcaaacttcttctgtattgaaattatgtccttgtgagtctctttatcatcgtttcgtctttacattatatgtgctacttttgtctaatgagcctgaaaagtggctccaatggtacgcactggaagatttgttggcttctggtagatatagcgacagtgttgagcttgtaatatcatgtctcttattgctaaattagttcctttcttaacagaaaccttcaaagtttttgtttttgttttcatttacctaatgtacacatacgctggccatgactaacaacatgtccaggcttagagcatatttttttctagcttaaattgttaacttgtcattcagtaaaatccgagaattgtgaagctctaattgaagctaattcgttttataaagtcagttaaaaagtatactaaattatccaacttttcttcaaaatctcaaaattctatgacaaaacgatagtctttgtttatgtcagtaccacaaagaggtggaaaaaaacaccaaaaaaacaataagcaaactatacactgagaagaaaaataaaagagagctcaatagatgttttatactaacggtagattagatcaaagatccaagctttactctacatagagcagaacccagaatcccttcatatctcttttattctagcaccgataatctactgaaaagaagacacttagagctctgtctctttgtcaaagaagtcccagccgtcatccagaagctccttacgttcattaacagagaagttcctattccgaagttcctattcttcaaaaagtataggaacttctgattccgatgacttcgtaggttcctagctcaagccgctcgtgtccaagcgtcacttacgattagctaatgattacggcatctaggaccgactagttcgggcaaccaaaaattatatattgacaattttttatttatttttggaactggtaattcatacccaattaacgaagaattacactatgtattttagcgaaaccagctttctttatttattaactaccacaattaggacttttagatgttgaatgagaccctaagtatctttaccagctttggtttttttaggctagttatgaaactaatcttctgattaggacttggtcacactaaaacttcttgtcacttttaaaggatatgttctatgagaattagcctaagtccttttatcacaaacgcatcggtcttgtgagcaaaaacaacttctaatgcgtgaatagttaaatatataaaataaaaaaatgaagtttgaccgaaatcatagttggcattgatattcagttattatcgactctctttca

SEQ ID NO: 126 - DNA, 4660 bp, synthetic construct
  misc_feature 1..4660: note = Guide sequence or cassette for donor insertion
  source 1..4660: mol_type = other DNA
catcaaaatatatgtaggtgtcaccaccatgatcttgagcactaagaatcaccacgtgagtcacagctgctatggaggtaatatttgtttttactcataagtcagcattccgtagtcaaaacaacaatgacttagggagaggtaatattcattttaactcttaaataagtaattcttaattaaaacaatactgattgggggataattatttcgaaggttatactgactttccttatttagtctgagttgaaacactcagatgacttgggcgagtgaagactgtcctaagaataccaagttcaacagctagaaccggtacctacacctaacatgaaatttctgaaatagaagtaacacatgaacttaagcacatctaatcatgtgatcacctcacacgtaatacttaacaaacccaatgactttttccgccaagtgcacctacgtatatgaccccttcgagctagttaccctatgaggtgacatgaagcgctcacggttactatgacggttagcttcacgactgttggtggcagtagcgtacgacttagctatagttccggacttaccataacttcgtatagcatacattatacgaagttatatcaggatattcttgtttaagatgttgaactctatggaggtttgtatgaactgatgatctaggaccggataagttcccttcttcatagcgaacttattcaaagaatgttttgtgtatcattcttgttacattgttattaatgaaaaaatattattggtcattggactgaacacgagtgttaaatatggaccaggccccaaataagatccattgatatatgaattaaataacaagaataaatcgagtcaccaaaccacttgccttttttaacgagacttgttcaccaacttgatacaaaagtcattatcctatgcaaatcaataatcatacaaaaatatccaataacactaaaaaattaaaagaaatggataatttcacaatatgttatacgataaagaagttacttttccaagaaattcactgattttataagcccacttgcattagataaatggcaaaaaaaaacaaaaaggaaaagaaataaagcacgaagaattctagaaaatacgaaatacgcttcaatgcagtgggacccacggttcaattattgccaattttcagctccaccgtatatttaaaaaataaaacgataatgctaaaaaaatataaatcgtaacgatcgttaaatctcaacggctggatcttatgacgaccgttagaaattgtggttgtcgacgagtcagtaataaacggcgtcaaagtggttgcagccggcacacacgagtcgtgtttatcaactcaaagcacaaatacttttcctcaacctaaaaataaggcaattagccaaaaacaactttgcgtgtaaacaacgctcaatacacgtgtcattttattattagctattgcttcaccgccttagctttctcgtgacctagtcgtcctcgtcttttcttcttcttcttctataaaacaatacccaaagagctcttcttcttcacaattcagatttcaatttctcaaaatcttaaaaactttctctcaattctctctaccgtgatcaaggtaaatttctgtgttccttattctctcaaaatcttcgattttgttttcgttcgatcccaatttcgtatatgttctttggtttagattctgttaatcttagatcgaagacgattttctgggtttgatcgttagatatcatcttaattctcgattagggtttcatagatatcatccgatttgttcaaataatttgagttttgtcgaataattactcttcgatttgtgatttctatctagatctggtgttagtttctagtttgtgcgatcgaatttgtcgattaatctgagtttttctgattaacaggtcgactttaacttagcctagcgaagttcctattccgaagttcctattctctagaaagtataggaacttcagatccaccgggatccccgatcatgcagaagctcatcaactctgtgcagaactacgcctggggctctaagaccgccttgaccgagttgtacgggatggagaacccttcctcacagcctatggccgagttgtggatgggtgctcaccctaagtcctcctccagagtgcagaacgctgctggagacattgtctccctcagagacgtgatcgagtccgacaagtccaccctgctgggagaggccgtcgctaagagattcggtgagttgcccttcttgttcaaggtcctctgcgctgctcagcccttgtctatccaagtgcaccctaacaagcacaactccgagatcggattcgccaaggagaacgctgctggcatccctatggacgcagctgagcgtaactacaaagaccctaaccacaagcccgagttggtgttcgctctcacccctttcttggccatgaacgctttccgcgagttctctgagattgtgtcactcctccagcccgttgctggtgctcaccctgctatcgctcacttcttgcagcagcctgacgctgagaggctctcagagctgttcgcttccctcctcaacatgcaaggcgaagagaagtccagagccctcgccatcctgaagtctgccctcgactctcagcagggagagccctggcagactattcgcctgatttccgagttctacccagaggactccgggttgttctctcccttgttgctcaacgtggtgaagctgaacccaggcgaggccatgttcttgttcgccgagactcctcacgcctacctccaaggagtggccctggaggtcatggccaactctgacaacgtccttagagctggccttactcctaaatacatcgacattcccgagctggtggccaacgtgaagttcgaggccaagcctgctaaccagttgctcacccagcccgttaagcagggagctgaactcgacttccctatccctgttgacgacttcgccttctccttgcacgacctctctgacaaggagactaccatatcccagcagtccgctgctatcctgttctgcgtggagggagacgctaccctgtggaaaggatctcagcagcttcagctgaagcctggagagtcagctttcattgctgccaacgagtcacctgtgactgtgaagggccacgggaggctcgccagagtctacaacaagttgtagaaacttatctctgttatgaatcagaagaagttcatgtctcgtttcatttaaaactttggtggtttgtgttttggggccttgtaaagcccctgatgaataattgttcaactatgtttccgttcctgtgttatacctttctttctaatgagtaatgacatcaaacttcttctgtattgaaattatgtccttgtgagtctctttatcatcgtttcgtctttacattatatgtgctacttttgtctaatgagcctgaaaagtggctccaatggtacgcactggaagatttgttggcttctggtagatatagcgacagtgttgagcttgtaatatcatgtctcttattgctaaattagttcctttcttaacagaaaccttcaaagtttttgtttttgttttcatttacctaatgtacacatacgctggccatgactaacaacatgtccaggcttagagcatatttttttctagcttaaattgttaacttgtcattcagtaaaatccgagaattgtgaagctctaattgaagctaattcgttttataaagtcagttaaaaagtatactaaattatccaacttttcttcaaaatctcaaaattctatgacaaaacgatagtctttgtttatgtcagtaccacaaagaggtggaaaaaaacaccaaaaaaacaataagcaaactatacactgagaagaaaaataaaagagagctcaatagatgttttatactaacggtagattagatcaaagatccaagctttactctacatagagcagaacccagaatcccttcatatctcttttattctagcaccgataatctactgaaaagaagacacttagagctctgtctctttgtcaaagaagtcccagccgtcatccagaagctccttacgttcattaacagatcccagccgtcatccagaagctccttacgttcattaacagagaagttcctattccgaagttcctattcttcaaaaagtataggaacttctgattccgatgacttcgtaggttcctagctcaagccgctcgtgtccaagcgtcacttacgattagctaatgattacggcatctaggaccgactagctcaggtacaaacagtgtaacttgactcatttctcattttctcaaacattttctgacttgatcgtcaaaattatatatagttgtcaccactgcaatcttcaactgtggagcacggtgaaccaccatgcgagtcaccagaatcctccttctcgtggataacttaatgacatgttactaggtcaatgaaaattgataccatgaatgtaaaaaactgacaaattaaaaaaacaatttgatctaaacactataaggagccaaaataaatctttttaaactcaaagaatcaaattaaaccctaaaatataaataattaaaaaactaaaattataatttagcctgacttatataagaaagtcttcttaattcttggcaagaatgtatagcagtactagtatgata

SEQ ID NO: 127 - DNA, 4512 bp, synthetic construct
  misc_feature 1..4512: note = Guide sequence or cassette for donor insertion
  source 1..4512: mol_type = other DNA
tttttttaaagtttaaaaacattccaaaggaataaggtgtcaaagtgagtccaatcagttcacctaaaaaatcagtcttttgtcttgctatgttcacattgacaattctttacagacgaagaaatgttaaaaaaaatttcttactttccaaataaatcttcttacatctatatataaacattgatttacatacaaataggatttaattttttttcaaaattaaaatttttgttactttttatggttgaataagttgaaattttaggaatttaaagaattttgaaaaagagttactaataagaaaattgaaaaaaaaatctcacattaaagttttttattcttttttgggccatgttcgagctagttaccctatgaggtgacatgaagcgctcacggttactatgacggttagcttcacgactgttggtggcagtagcgtacgacttagctatagttccggacttaccataacttcgtatagcatacattatacgaagttatatcaggatattcttgtttaagatgttgaactctatggaggtttgtatgaactgatgatctaggaccggataagttcccttcttcatagcgaacttattcaaagaatgttttgtgtatcattcttgttacattgttattaatgaaaaaatattattggtcattggactgaacacgagtgttaaatatggaccaggccccaaataagatccattgatatatgaattaaataacaagaataaatcgagtcaccaaaccacttgccttttttaacgagacttgttcaccaacttgatacaaaagtcattatcctatgcaaatcaataatcatacaaaaatatccaataacactaaaaaattaaaagaaatggataatttcacaatatgttatacgataaagaagttacttttccaagaaattcactgattttataagcccacttgcattagataaatggcaaaaaaaaacaaaaaggaaaagaaataaagcacgaagaattctagaaaatacgaaatacgcttcaatgcagtgggacccacggttcaattattgccaattttcagctccaccgtatatttaaaaaataaaacgataatgctaaaaaaatataaatcgtaacgatcgttaaatctcaacggctggatcttatgacgaccgttagaaattgtggttgtcgacgagtcagtaataaacggcgtcaaagtggttgcagccggcacacacgagtcgtgtttatcaactcaaagcacaaatacttttcctcaacctaaaaataaggcaattagccaaaaacaactttgcgtgtaaacaacgctcaatacacgtgtcattttattattagctattgcttcaccgccttagctttctcgtgacctagtcgtcctcgtcttttcttcttcttcttctataaaacaatacccaaagagctcttcttcttcacaattcagatttcaatttctcaaaatcttaaaaactttctctcaattctctctaccgtgatcaaggtaaatttctgtgttccttattctctcaaaatcttcgattttgttttcgttcgatcccaatttcgtatatgttctttggtttagattctgttaatcttagatcgaagacgattttctgggtttgatcgttagatatcatcttaattctcgattagggtttcatagatatcatccgatttgttcaaataatttgagttttgtcgaataattactcttcgatttgtgatttctatctagatctggtgttagtttctagtttgtgcgatcgaatttgtcgattaatctgagtttttctgattaacaggtcgactttaacttagcctagcgaagttcctattccgaagttcctattctctagaaagtataggaacttcagatccaccgggatccccgatcatgcaaaaactcattaactcagtgcaaaactatgcctggggcagcaaaacggcgttgactgaactttatggtatggaaaatccgtccagccagccgatggccgagctgtggatgggcgcacatccgaaaagcagttcacgagtgcagaatgccgccggagatatcgtttcactgcgtgatgtgattgagagtgataaatcgactctgctcggagaggccgttgccaaacgctttggcgaactgcctttcctgttcaaagtattatgcgcagcacagccactctccattcaggttcatccaaacaaacacaattctgaaatcggttttgccaaagaaaatgccgcaggtatcccgatggatgccgccgagcgtaactataaagatcctaaccacaagccggagctggtttttgcgctgacgcctttccttgcgatgaacgcgtttcgtgaattttccgagattgtctccctactccagccggtcgcaggtgcacatccggcgattgctcactttttacaacagcctgatgccgaacgtttaagcgaactgttcgccagcctgttgaatatgcagggtgaagaaaaatcccgcgcgctggcgattttaaaatcggccctcgatagccagcagggtgaaccgtggcaaacgattcgtttaatttctgaattttacccggaagacagcggtctgttctccccgctattgctgaatgtggtgaaattgaaccctggcgaagcgatgttcctgttcgctgaaacaccgcacgcttacctgcaaggcgtggcgctggaagtgatggcaaactccgataacgtgctgcgtgcgggtctgacgcctaaatacattgatattccggaactggttgccaatgtgaaattcgaagccaaaccggctaaccagttgttgacccagccggtgaaacaaggtgcagaactggacttcccgattccagtggatgattttgccttctcgctgcatgaccttagtgataaagaaaccaccattagccagcagagtgccgccattttgttctgcgtcgaaggcgatgcaacgttgtggaaaggttctcagcagttacagcttaaaccgggtgaatcagcgtttattgccgccaacgaatcaccggtgactgtcaaaggccacggccgtttagcgcgtgtttacaacaagctgtaaaaacttatctctgttatgaatcagaagaagttcatgtctcgtttcatttaaaactttggtggtttgtgttttggggccttgtaaagcccctgatgaataattgttcaactatgtttccgttcctgtgttatacctttctttctaatgagtaatgacatcaaacttcttctgtattgaaattatgtccttgtgagtctctttatcatcgtttcgtctttacattatatgtgctacttttgtctaatgagcctgaaaagtggctccaatggtacgcactggaagatttgttggcttctggtagatatagcgacagtgttgagcttgtaatatcatgtctcttattgctaaattagttcctttcttaacagaaaccttcaaagtttttgtttttgttttcatttacctaatgtacacatacgctggccatgactaacaacatgtccaggcttagagcatatttttttctagcttaaattgttaacttgtcattcagtaaaatccgagaattgtgaagctctaattgaagctaattcgttttataaagtcagttaaaaagtatactaaattatccaacttttcttcaaaatctcaaaattctatgacaaaacgatagtctttgtttatgtcagtaccacaaagaggtggaaaaaaacaccaaaaaaacaataagcaaactatacactgagaagaaaaataaaagagagctcaatagatgttttatactaacggtagattagatcaaagatccaagctttactctacatagagcagaacccagaatcccttcatatctcttttattctagcaccgataatctactgaaaagaagacacttagagctctgtctctttgtcaaagaagtcccagccgtcatccagaagctccttacgttcattaacagagaagttcctattccgaagttcctattcttcaaaaagtataggaacttctgattccgatgacttcgtaggttcctagctcaagccgctcgtgtccaagcgtcacttacgattagctaatgattactgcaatcacgggccttgtacatgcagtctcacccaaaaagacgccagggcatcttgcaatcataacaacaattatttaatattgaatgatatatattataaattttttaggtgcatgattactaaactatattctaaacctcacttacatataatatcacataataattttaaaatattgaggtttctgtaagtataaactaatatactataataattaaggttatagttgagaataccaactaaaaagctaataaaaagtgaaaaaattagctgataactaaaaactaaaatttggtagctaaaatctattaaattagtttaattattaaatgataattagtatccaataaaattacttattggaataactggaaatataaaatgataaaaatagacatatttatatgat

SEQ ID NO: 128 - DNA, 4722 bp, synthetic construct
  misc_feature 1..4722: note = Guide sequence or cassette for donor insertion
  source 1..4722: mol_type = other DNA
ctaagggcttttgcagtcaacagaataaaccctgatgtgttctacttcgatcctcttttttttggaattccatttaaattatactcgcatattccatgtcgtattattatcttctgaaaattatcgacggatgctcgactatgtgaacattttgtttgtgttataccactaacttcaaaattaacaaaactcatctaatttttataacaaaaaattatgcattaatttaattatattcaaaaagcatttccaaaaattcaaacattttagtacatgcagttcattttaagtcattttaatggtgacaacaacgaaaatagggttaattaataagttttgacattaataaaatgtcaaagttcaagtgagctagatgcatcatgtaccttctctaatgtaaaaatatatatatgaaacacatggaggtccgttcaccagtctatttccaatgatgccgctctcgagctagttaccctatgaggtgacatgaagcgctcacggttactatgacggttagcttcacgactgttggtggcagtagcgtacgacttagctatagttccggacttaccataacttcgtatagcatacattatacgaagttatatcaggatattcttgtttaagatgttgaactctatggaggtttgtatgaactgatgatctaggaccggataagttcccttcttcatagcgaacttattcaaagaatgttttgtgtatcattcttgttacattgttattaatgaaaaaatattattggtcattggactgaacacgagtgttaaatatggaccaggccccaaataagatccattgatatatgaattaaataacaagaataaatcgagtcaccaaaccacttgccttttttaacgagacttgttcaccaacttgatacaaaagtcattatcctatgcaaatcaataatcatacaaaaatatccaataacactaaaaaattaaaagaaatggataatttcacaatatgttatacgataaagaagttacttttccaagaaattcactgattttataagcccacttgcattagataaatggcaaaaaaaaacaaaaaggaaaagaaataaagcacgaagaattctagaaaatacgaaatacgcttcaatgcagtgggacccacggttcaattattgccaattttcagctccaccgtatatttaaaaaataaaacgataatgctaaaaaaatataaatcgtaacgatcgttaaatctcaacggctggatcttatgacgaccgttagaaattgtggttgtcgacgagtcagtaataaacggcgtcaaagtggttgcagccggcacacacgagtcgtgtttatcaactcaaagcacaaatacttttcctcaacctaaaaataaggcaattagccaaaaacaactttgcgtgtaaacaacgctcaatacacgtgtcattttattattagctattgcttcaccgccttagctttctcgtgacctagtcgtcctcgtcttttcttcttcttcttctataaaacaatacccaaagagctcttcttcttcacaattcagatttcaatttctcaaaatcttaaaaactttctctcaattctctctaccgtgatcaaggtaaatttctgtgttccttattctctcaaaatcttcgattttgttttcgttcgatcccaatttcgtatatgttctttggtttagattctgttaatcttagatcgaagacgattttctgggtttgatcgttagatatcatcttaattctcgattagggtttcatagatatcatccgatttgttcaaataatttgagttttgtcgaataattactcttcgatttgtgatttctatctagatctggtgttagtttctagtttgtgcgatcgaatttgtcgattaatctgagtttttctgattaacaggtcgactttaacttagcctagcgaagttcctattccgaagttcctattctctagaaagtataggaacttcagatccaccgggatccccgatcatgcagaagctcatcaactctgtgcagaactacgcctggggctctaagaccgccttgaccgagttgtacgggatggagaacccttcctcacagcctatggccgagttgtggatgggtgctcaccctaagtcctcctccagagtgcagaacgctgctggagacattgtctccctcagagacgtgatcgagtccgacaagtccaccctgctgggagaggccgtcgctaagagattcggtgagttgcccttcttgttcaaggtcctctgcgctgctcagcccttgtctatccaagtgcaccctaacaagcacaactccgagatcggattcgccaaggagaacgctgctggcatccctatggacgcagctgagcgtaactacaaagaccctaaccacaagcccgagttggtgttcgctctcacccctttcttggccatgaacgctttccgcgagttctctgagattgtgtcactcctccagcccgttgctggtgctcaccctgctatcgctcacttcttgcagcagcctgacgctgagaggctctcagagctgttcgcttccctcctcaacatgcaaggcgaagagaagtccagagccctcgccatcctgaagtctgccctcgactctcagcagggagagccctggcagactattcgcctgatttccgagttctacccagaggactccgggttgttctctcccttgttgctcaacgtggtgaagctgaacccaggcgaggccatgttcttgttcgccgagactcctcacgcctacctccaaggagtggccctggaggtcatggccaactctgacaacgtccttagagctggccttactcctaaatacatcgacattcccgagctggtggccaacgtgaagttcgaggccaagcctgctaaccagttgctcacccagcccgttaagcagggagctgaactcgacttccctatccctgttgacgacttcgccttctccttgcacgacctctctgacaaggagactaccatatcccagcagtccgctgctatcctgttctgcgtggagggagacgctaccctgtggaaaggatctcagcagcttcagctgaagcctggagagtcagctttcattgctgccaacgagtcacctgtgactgtgaagggccacgggaggctcgccagagtctacaacaagttgtagaaacttatctctgttatgaatcagaagaagttcatgtctcgtttcatttaaaactttggtggtttgtgttttggggccttgtaaagcccctgatgaataattgttcaactatgtttccgttcctgtgttatacctttctttctaatgagtaatgacatcaaacttcttctgtattgaaattatgtccttgtgagtctctttatcatcgtttcgtctttacattatatgtgctacttttgtctaatgagcctgaaaagtggctccaatggtacgcactggaagatttgttggcttctggtagatatagcgacagtgttgagcttgtaatatcatgtctcttattgctaaattagttcctttcttaacagaaaccttcaaagtttttgtttttgttttcatttacctaatgtacacatacgctggccatgactaacaacatgtccaggcttagagcatatttttttctagcttaaattgttaacttgtcattcagtaaaatccgagaattgtgaagctctaattgaagctaattcgttttataaagtcagttaaaaagtatactaaattatccaacttttcttcaaaatctcaaaattctatgacaaaacgatagtctttgtttatgtcagtaccacaaagaggtggaaaaaaacaccaaaaaaacaataagcaaactatacactgagaagaaaaataaaagagagctcaatagatgttttatactaacggtagattagatcaaagatccaagctttactctacatagagcagaacccagaatcccttcatatctcttttattctagcaccgataatctactgaaaagaagacacttagagctctgtctctttgtcaaagaagtcccagccgtcatccagaagctccttacgttcattaacagatcccagccgtcatccagaagctccttacgttcattaacagagaagttcctattccgaagttcctattcttcaaaaagtataggaacttctgattccgatgacttcgtaggttcctagctcaagccgctcgtgtccaagcgtcacttacgattagctaatgattacggcatctaggaccgactagggcaacagtataagcacaaaggtaacaaactcaaccactagggtcctacatgaactgcttaataaatattcttatggttacttttattgttaactgctacttcagtttgccatatgatgttataaatattattctatacaattttattttattttgagaaatgctatatccgcccaataaaactttgacagttgtctataaattttattgtaaaatattattttcttttaccaattaaaatttgatatctttccaatgctgtcccttgctatacgacaacacccctttcccacaagcagggaacgaggtagatgtctagacgaaggcaatgcgtgatgctccaatgagattgcaactgaaattcagaaacaattaagggattttcttgcaagcatgagcattcagcttttctgtctcttgtgactgagagtgacagttctactggtgttgtctgtg

SEQ ID NO: 129 - DNA, 4642 bp, synthetic construct
  misc_feature 1..4642: note = Guide sequence or cassette for donor insertion
  source 1..4642: mol_type = other DNA
aagcagttttataattttttgatgtatttgtctgaactgtttttacttaaaataagtagttttctactttttctaagaaacaaattctatatgtttctcaacaaatgtttatataaaaagaatttttgaaattttttttattttattttaaacaaacagggcaaaaataagtttttttttttaaagttacttttatgattgtaaataaaacataaaattgcattattcttttttttataaaaaaagtaatcattgatacattttgtatcaaaattactcttttttctttgatgactttagtattgaaatatttttgtaattataaatattatgctattaccaagaagaaaagagactaggtatgacaatggggtgtcgcggggatcggtcgagctagttaccctatgaggtgacatgaagcgctcacggttactatgacggttagcttcacgactgttggtggcagtagcgtacgacttagctatagttccggacttaccataacttcgtatagcatacattatacgaagttatatcaggatattcttgtttaagatgttgaactctatggaggtttgtatgaactgatgatctaggaccggataagttcccttcttcatagcgaacttattcaaagaatgttttgtgtatcattcttgttacattgttattaatgaaaaaatattattggtcattggactgaacacgagtgttaaatatggaccaggccccaaataagatccattgatatatgaattaaataacaagaataaatcgagtcaccaaaccacttgccttttttaacgagacttgttcaccaacttgatacaaaagtcattatcctatgcaaatcaataatcatacaaaaatatccaataacactaaaaaattaaaagaaatggataatttcacaatatgttatacgataaagaagttacttttccaagaaattcactgattttataagcccacttgcattagataaatggcaaaaaaaaacaaaaaggaaaagaaataaagcacgaagaattctagaaaatacgaaatacgcttcaatgcagtgggacccacggttcaattattgccaattttcagctccaccgtatatttaaaaaataaaacgataatgctaaaaaaatataaatcgtaacgatcgttaaatctcaacggctggatcttatgacgaccgttagaaattgtggttgtcgacgagtcagtaataaacggcgtcaaagtggttgcagccggcacacacgagtcgtgtttatcaactcaaagcacaaatacttttcctcaacctaaaaataaggcaattagccaaaaacaactttgcgtgtaaacaacgctcaatacacgtgtcattttattattagctattgcttcaccgccttagctttctcgtgacctagtcgtcctcgtcttttcttcttcttcttctataaaacaatacccaaagagctcttcttcttcacaattcagatttcaatttctcaaaatcttaaaaactttctctcaattctctctaccgtgatcaaggtaaatttctgtgttccttattctctcaaaatcttcgattttgttttcgttcgatcccaatttcgtatatgttctttggtttagattctgttaatcttagatcgaagacgattttctgggtttgatcgttagatatcatcttaattctcgattagggtttcatagatatcatccgatttgttcaaataatttgagttttgtcgaataattactcttcgatttgtgatttctatctagatctggtgttagtttctagtttgtgcgatcgaatttgtcgattaatctgagtttttctgattaacaggtcgactttaacttagcctagcgaagttcctattccgaagttcctattctctagaaagtataggaacttcagatccaccgggatccccgatcatgcagaagctcatcaactctgtgcagaactacgcctggggctctaagaccgccttgaccgagttgtacgggatggagaacccttcctcacagcctatggccgagttgtggatgggtgctcaccctaagtcctcctccagagtgcagaacgctgctggagacattgtctccctcagagacgtgatcgagtccgacaagtccaccctgctgggagaggccgtcgctaagagattcggtgagttgcccttcttgttcaaggtcctctgcgctgctcagcccttgtctatccaagtgcaccctaacaagcacaactccgagatcggattcgccaaggagaacgctgctggcatccctatggacgcagctgagcgtaactacaaagaccctaaccacaagcccgagttggtgttcgctctcacccctttcttggccatgaacgctttccgcgagttctctgagattgtgtcactcctccagcccgttgctggtgctcaccctgctatcgctcacttcttgcagcagcctgacgctgagaggctctcagagctgttcgcttccctcctcaacatgcaaggcgaagagaagtccagagccctcgccatcctgaagtctgccctcgactctcagcagggagagccctggcagactattcgcctgatttccgagttctacccagaggactccgggttgttctctcccttgttgctcaacgtggtgaagctgaacccaggcgaggccatgttcttgttcgccgagactcctcacgcctacctccaaggagtggccctggaggtcatggccaactctgacaacgtccttagagctggccttactcctaaatacatcgacattcccgagctggtggccaacgtgaagttcgaggccaagcctgctaaccagttgctcacccagcccgttaagcagggagctgaactcgacttccctatccctgttgacgacttcgccttctccttgcacgacctctctgacaaggagactaccatatcccagcagtccgctgctatcctgttctgcgtggagggagacgctaccctgtggaaaggatctcagcagcttcagctgaagcctggagagtcagctttcattgctgccaacgagtcacctgtgactgtgaagggccacgggaggctcgccagagtctacaacaagttgtagaaacttatctctgttatgaatcagaagaagttcatgtctcgtttcatttaaaactttggtggtttgtgttttggggccttgtaaagcccctgatgaataattgttcaactatgtttccgttcctgtgttatacctttctttctaatgagtaatgacatcaaacttcttctgtattgaaattatgtccttgtgagtctctttatcatcgtttcgtctttacattatatgtgctacttttgtctaatgagcctgaaaagtggctccaatggtacgcactggaagatttgttggcttctggtagatatagcgacagtgttgagcttgtaatatcatgtctcttattgctaaattagttcctttcttaacagaaaccttcaaagtttttgtttttgttttcatttacctaatgtacacatacgctggccatgactaacaacatgtccaggcttagagcatatttttttctagcttaaattgttaacttgtcattcagtaaaatccgagaattgtgaagctctaattgaagctaattcgttttataaagtcagttaaaaagtatactaaattatccaacttttcttcaaaatctcaaaattctatgacaaaacgatagtctttgtttatgtcagtaccacaaagaggtggaaaaaaacaccaaaaaaacaataagcaaactatacactgagaagaaaaataaaagagagctcaatagatgttttatactaacggtagattagatcaaagatccaagctttactctacatagagcagaacccagaatcccttcatatctcttttattctagcaccgataatctactgaaaagaagacacttagagctctgtctctttgtcaaagaagtcccagccgtcatccagaagctccttacgttcattaacagatcccagccgtcatccagaagctccttacgttcattaacagagaagttcctattccgaagttcctattcttcaaaaagtataggaacttctgattccgatgacttcgtaggttcctagctcaagccgctcgtgtccaagcgtcacttacgattagctaatgattacggcatctaggaccgactagtttaggctacccacctctgccctcaacatctcaaacgatttccgttgaggttaaaaattagacccaccctcgcctttggttgggtattggattttcccatctcaaccttgtccccaattatcgtgtcttgtgcaataagatacaatagattggattgtcgtgactcccacgaatttgcaatgaagggattggtgtcgttgtcatgacgattgtaaggatgggatgtgattgtcaatgtcattgttgagactttcacgaacctaagatgaaggaggggtgttgtgactgtcgcgataaaggaggacactcagcaacagatgaacactcagagttaggtttgaaggattgagaatgtgaggagtgacacaatgagagtaagagtctaaggaattgtagttaatgataagagtgagaagaggcaacaaagacatatgtattagggtatatt

SEQ ID NO: 130 - DNA, 548 bp, synthetic construct
  misc_feature 1..548: note = Guide sequence or cassette for donor insertion
  source 1..548: mol_type = other DNA
ccgggtgtgatttagtataaagtgaagtaatggtcaaaagaaaaagtgtaaaacgaagtacctagtaataagtaatattgaacaaaataaatggtaaagtgtcagatatataaaataggctttaataaaaggaagaaaaaaaacaaacaaaaaataggttgcaatggggcagagcagagtcatcatgaagctagaaaggctaccgatagataaactatagttaattaaatacattaaaaaatacttggatctttctcttaccctgtttatattgagacctgaaacttgagagagatacactaatcttgccttgttgtttcattccctaacttacaggactcagcgcatgtcatgtggtctcgttccccatttaagtcccacaccgtctaaacttattaaattattaatgtttataactagatgcacaacaacaaagcttgttaatctctttagcgggatgttttagagctagaaatagcaagttaaaataaggctagtccgttatcaacttgaaaaagtggcaccgagtcggtgctttttttggccta

SEQ ID NO: 131 - DNA, 548 bp, synthetic construct
  misc_feature 1..548: note = Guide sequence or cassette for donor insertion
  source 1..548: mol_type = other DNA
ccgggtgtgatttagtataaagtgaagtaatggtcaaaagaaaaagtgtaaaacgaagtacctagtaataagtaatattgaacaaaataaatggtaaagtgtcagatatataaaataggctttaataaaaggaagaaaaaaaacaaacaaaaaataggttgcaatggggcagagcagagtcatcatgaagctagaaaggctaccgatagataaactatagttaattaaatacattaaaaaatacttggatctttctcttaccctgtttatattgagacctgaaacttgagagagatacactaatcttgccttgttgtttcattccctaacttacaggactcagcgcatgtcatgtggtctcgttccccatttaagtcccacaccgtctaaacttattaaattattaatgtttataactagatgcacaacaacaaagcttggctgcacttctcgtacgtagttttagagctagaaatagcaagttaaaataaggctagtccgttatcaacttgaaaaagtggcaccgagtcggtgctttttttggccta

SEQ ID NO: 132 - DNA, 548 bp, synthetic construct
  misc_feature 1..548: note = Guide sequence or cassette for donor insertion
  source 1..548: mol_type = other DNA
ccgggtgtgatttagtataaagtgaagtaatggtcaaaagaaaaagtgtaaaacgaagtacctagtaataagtaatattgaacaaaataaatggtaaagtgtcagatatataaaataggctttaataaaaggaagaaaaaaaacaaacaaaaaataggttgcaatggggcagagcagagtcatcatgaagctagaaaggctaccgatagataaactatagttaattaaatacattaaaaaatacttggatctttctcttaccctgtttatattgagacctgaaacttgagagagatacactaatcttgccttgttgtttcattccctaacttacaggactcagcgcatgtcatgtggtctcgttccccatttaagtcccacaccgtctaaacttattaaattattaatgtttataactagatgcacaacaacaaagcttgaacatgctggtcagttcgcgttttagagctagaaatagcaagttaaaataaggctagtccgttatcaacttgaaaaagtggcaccgagtcggtgctttttttggccta

SEQ ID NO: 133 - DNA, 548 bp, synthetic construct
  misc_feature 1..548: note = Guide sequence or cassette for donor insertion
  source 1..548: mol_type = other DNA
ccgggtgtgatttagtataaagtgaagtaatggtcaaaagaaaaagtgtaaaacgaagtacctagtaataagtaatattgaacaaaataaatggtaaagtgtcagatatataaaataggctttaataaaaggaagaaaaaaaacaaacaaaaaataggttgcaatggggcagagcagagtcatcatgaagctagaaaggctaccgatagataaactatagttaattaaatacattaaaaaatacttggatctttctcttaccctgtttatattgagacctgaaacttgagagagatacactaatcttgccttgttgtttcattccctaacttacaggactcagcgcatgtcatgtggtctcgttccccatttaagtcccacaccgtctaaacttattaaattattaatgtttataactagatgcacaacaacaaagcttgttctaggcagagcgcgcaagttttagagctagaaatagcaagttaaaataaggctagtccgttatcaacttgaaaaagtggcaccgagtcggtgctttttttggccta

SEQ ID NO: 134 - DNA, 548 bp, synthetic construct
  misc_feature 1..548: note = Guide sequence or cassette for donor insertion
  source 1..548: mol_type = other DNA
ccgggtgtgatttagtataaagtgaagtaatggtcaaaagaaaaagtgtaaaacgaagtacctagtaataagtaatattgaacaaaataaatggtaaagtgtcagatatataaaataggctttaataaaaggaagaaaaaaaacaaacaaaaaataggttgcaatggggcagagcagagtcatcatgaagctagaaaggctaccgatagataaactatagttaattaaatacattaaaaaatacttggatctttctcttaccctgtttatattgagacctgaaacttgagagagatacactaatcttgccttgttgtttcattccctaacttacaggactcagcgcatgtcatgtggtctcgttccccatttaagtcccacaccgtctaaacttattaaattattaatgtttataactagatgcacaacaacaaagcttgggagcccagggtgagtcgggttttagagctagaaatagcaagttaaaataaggctagtccgttatcaacttgaaaaagtggcaccgagtcggtgctttttttggccta

SEQ ID NO: 135 - DNA, 548 bp, synthetic construct
  misc_feature 1..548: note = Guide sequence or cassette for donor insertion
  source 1..548: mol_type = other DNA
ccgggtgtgatttagtataaagtgaagtaatggtcaaaagaaaaagtgtaaaacgaagtacctagtaataagtaatattgaacaaaataaatggtaaagtgtcagatatataaaataggctttaataaaaggaagaaaaaaaacaaacaaaaaataggttgcaatggggcagagcagagtcatcatgaagctagaaaggctaccgatagataaactatagttaattaaatacattaaaaaatacttggatctttctcttaccctgtttatattgagacctgaaacttgagagagatacactaatcttgccttgttgtttcattccctaacttacaggactcagcgcatgtcatgtggtctcgttccccatttaagtcccacaccgtctaaacttattaaattattaatgtttataactagatgcacaacaacaaagcttgagtaaaccgcggtcgaactgttttagagctagaaatagcaagttaaaataaggctagtccgttatcaacttgaaaaagtggcaccgagtcggtgctttttttggccta

SEQ ID NO: 136 - DNA, 548 bp, synthetic construct
  misc_feature 1..548: note = Guide sequence or cassette for donor insertion
  source 1..548: mol_type = other DNA
ccgggtgtgatttagtataaagtgaagtaatggtcaaaagaaaaagtgtaaaacgaagtacctagtaataagtaatattgaacaaaataaatggtaaagtgtcagatatataaaataggctttaataaaaggaagaaaaaaaacaaacaaaaaataggttgcaatggggcagagcagagtcatcatgaagctagaaaggctaccgatagataaactatagttaattaaatacattaaaaaatacttggatctttctcttaccctgtttatattgagacctgaaacttgagagagatacactaatcttgccttgttgtttcattccctaacttacaggactcagcgcatgtcatgtggtctcgttccccatttaagtcccacaccgtctaaacttattaaattattaatgtttataactagatgcacaacaacaaagcttgattaggggtcgatcctactgttttagagctagaaatagcaagttaaaataaggctagtccgttatcaacttgaaaaagtggcaccgagtcggtgctttttttggccta

SEQ ID NO: 137 - DNA, 548 bp, synthetic construct
  misc_feature 1..548: note = Guide sequence or cassette for donor insertion
  source 1..548: mol_type = other DNA
ccgggtgtgatttagtataaagtgaagtaatggtcaaaagaaaaagtgtaaaacgaagtacctagtaataagtaatattgaacaaaataaatggtaaagtgtcagatatataaaataggctttaataaaaggaagaaaaaaaacaaacaaaaaataggttgcaatggggcagagcagagtcatcatgaagctagaaaggctaccgatagataaactatagttaattaaatacattaaaaaatacttggatctttctcttaccctgtttatattgagacctgaaacttgagagagatacactaatcttgccttgttgtttcattccctaacttacaggactcagcgcatgtcatgtggtctcgttccccatttaagtcccacaccgtctaaacttattaaattattaatgtttataactagatgcacaacaacaaagcttggttcacgtcgaactaaaacgttttagagctagaaatagcaagttaaaataaggctagtccgttatcaacttgaaaaagtggcaccgagtcggtgctttttttggccta

SEQ ID NO: 138 - DNA, 548 bp, synthetic construct
  misc_feature 1..548: note = Guide sequence or cassette for donor insertion
  source 1..548: mol_type = other DNA
ccgggtgtgatttagtataaagtgaagtaatggtcaaaagaaaaagtgtaaaacgaagtacctagtaataagtaatattgaacaaaataaatggtaaagtgtcagatatataaaataggctttaataaaaggaagaaaaaaaacaaacaaaaaataggttgcaatggggcagagcagagtcatcatgaagctagaaaggctaccgatagataaactatagttaattaaatacattaaaaaatacttggatctttctcttaccctgtttatattgagacctgaaacttgagagagatacactaatcttgccttgttgtttcattccctaacttacaggactcagcgcatgtcatgtggtctcgttccccatttaagtcccacaccgtctaaacttattaaattattaatgtttataactagatgcacaacaacaaagcttgcgacgtgtgttacggcgaggttttagagctagaaatagcaagttaaaataaggctagtccgttatcaacttgaaaaagtggcaccgagtcggtgctttttttggccta

SEQ ID NO: 139 - DNA, 548 bp, synthetic construct
  misc_feature 1..548: note = Guide sequence or cassette for donor insertion
  source 1..548: mol_type = other DNA
ccgggtgtgatttagtataaagtgaagtaatggtcaaaagaaaaagtgtaaaacgaagtacctagtaataagtaatattgaacaaaataaatggtaaagtgtcagatatataaaataggctttaataaaaggaagaaaaaaaacaaacaaaaaataggttgcaatggggcagagcagagtcatcatgaagctagaaaggctaccgatagataaactatagttaattaaatacattaaaaaatacttggatctttctcttaccctgtttatattgagacctgaaacttgagagagatacactaatcttgccttgttgtttcattccctaacttacaggactcagcgcatgtcatgtggtctcgttccccatttaagtcccacaccgtctaaacttattaaattattaatgtttataactagatgcacaacaacaaagcttgacttggcccagctagacccgttttagagctagaaatagcaagttaaaataaggctagtccgttatcaacttgaaaaagtggcaccgagtcggtgctttttttgcggcc

SEQ ID NO: 140 - DNA, 548 bp, synthetic construct
  misc_feature 1..548: note = Guide sequence or cassette for donor insertion
  source 1..548: mol_type = other DNA
ccgggtgtgatttagtataaagtgaagtaatggtcaaaagaaaaagtgtaaaacgaagtacctagtaataagtaatattgaacaaaataaatggtaaagtgtcagatatataaaataggctttaataaaaggaagaaaaaaaacaaacaaaaaataggttgcaatggggcagagcagagtcatcatgaagctagaaaggctaccgatagataaactatagttaattaaatacattaaaaaatacttggatctttctcttaccctgtttatattgagacctgaaacttgagagagatacactaatcttgccttgttgtttcattccctaacttacaggactcagcgcatgtcatgtggtctcgttccccatttaagtcccacaccgtctaaacttattaaattattaatgtttataactagatgcacaacaacaaagcttgtgggaacaaaagctccatagttttagagctagaaatagcaagttaaaataaggctagtccgttatcaacttgaaaaagtggcaccgagtcggtgctttttttgcggcc

SEQ ID NO: 141 - DNA, 548 bp, synthetic construct
  misc_feature 1..548: note = Guide sequence or cassette for donor insertion
  source 1..548: mol_type = other DNA
ccgggtgtgatttagtataaagtgaagtaatggtcaaaagaaaaagtgtaaaacgaagtacctagtaataagtaatattgaacaaaataaatggtaaagtgtcagatatataaaataggctttaataaaaggaagaaaaaaaacaaacaaaaaataggttgcaatggggcagagcagagtcatcatgaagctagaaaggctaccgatagataaactatagttaattaaatacattaaaaaatacttggatctttctcttaccctgtttatattgagacctgaaacttgagagagatacactaatcttgccttgttgtttcattccctaacttacaggactcagcgcatgtcatgtggtctcgttccccatttaagtcccacaccgtctaaacttattaaattattaatgtttataactagatgcacaacaacaaagcttgcccttaccagtgtgattccgttttagagctagaaatagcaagttaaaataaggctagtccgttatcaacttgaaaaagtggcaccgagtcggtgctttttttgcggcc

SEQ ID NO: 142 - DNA, 548 bp, synthetic construct
  misc_feature 1..548: note = Guide sequence or cassette for donor insertion
  source 1..548: mol_type = other DNA
ccgggtgtgatttagtataaagtgaagtaatggtcaaaagaaaaagtgtaaaacgaagtacctagtaataagtaatattgaacaaaataaatggtaaagtgtcagatatataaaataggctttaataaaaggaagaaaaaaaacaaacaaaaaataggttgcaatggggcagagcagagtcatcatgaagctagaaaggctaccgatagataaactatagttaattaaatacattaaaaaatacttggatctttctcttaccctgtttatattgagacctgaaacttgagagagatacactaatcttgccttgttgtttcattccctaacttacaggactcagcgcatgtcatgtggtctcgttccccatttaagtcccacaccgtctaaacttattaaattattaatgtttataactagatgcacaacaacaaagcttggtatggtaaaccctgccgtgttttagagctagaaatagcaagttaaaataaggctagtccgttatcaacttgaaaaagtggcaccgagtcggtgctttttttgcggcc

SEQ ID NO: 143 - DNA, 548 bp, synthetic construct
  misc_feature 1..548: note = Guide sequence or cassette for donor insertion
  source 1..548: mol_type = other DNA
ccgggtgtgatttagtataaagtgaagtaatggtcaaaagaaaaagtgtaaaacgaagtacctagtaataagtaatattgaacaaaataaatggtaaagtgtcagatatataaaataggctttaataaaaggaagaaaaaaaacaaacaaaaaataggttgcaatggggcagagcagagtcatcatgaagctagaaaggctaccgatagataaactatagttaattaaatacattaaaaaatacttggatctttctcttaccctgtttatattgagacctgaaacttgagagagatacactaatcttgccttgttgtttcattccctaacttacaggactcagcgcatgtcatgtggtctcgttccccatttaagtcccacaccgtctaaacttattaaattattaatgtttataactagatgcacaacaacaaagcttgggtgggtatatgcgggtatgttttagagctagaaatagcaagttaaaataaggctagtccgttatcaacttgaaaaagtggcaccgagtcggtgctttttttgcggcc

SEQ ID NO: 144 - DNA, 548 bp, synthetic construct
  misc_feature 1..548: note = Guide sequence or cassette for donor insertion
  source 1..548: mol_type = other DNA
ccgggtgtgatttagtataaagtgaagtaatggtcaaaagaaaaagtgtaaaacgaagtacctagtaataagtaatattgaacaaaataaatggtaaagtgtcagatatataaaataggctttaataaaaggaagaaaaaaaacaaacaaaaaataggttgcaatggggcagagcagagtcatcatgaagctagaaaggctaccgatagataaactatagttaattaaatacattaaaaaatacttggatctttctcttaccctgtttatattgagacctgaaacttgagagagatacactaatcttgccttgttgtttcattccctaacttacaggactcagcgcatgtcatgtggtctcgttccccatttaagtcccacaccgtctaaacttattaaattattaatgtttataactagatgcacaacaacaaagcttgcacacagacagccgacagcgttttagagctagaaatagcaagttaaaataaggctagtccgttatcaacttgaaaaagtggcaccgagtcggtgctttttttgcggcc

SEQ ID NO: 145 - DNA, 4675 bp, synthetic construct
  misc_feature 1..4675: note = Guide sequence or cassette for donor insertion
  source 1..4675: mol_type = other DNA
atcatcattgacaaatacaaagttgggtgagttttatttgcagaatagtaaagaaaagcaactcataagtagctttttatcataagaaacacacatatatgaaaggtattttataatatcatcttattaataaatatatttagaattaaaaataatattttaatttttcagatgataaataattcaaaataaatcataataatttaaaaggtagtgattattttaaaataaaggcacttttggccgggttataggtggccgaaagattataatattctattaatttaatttttttattatagattaatttttgtaaaattgcattgtggacctctaccaatggctataaaacacattgtgtgcgactagagcaagtagacatggaaatgcttccccaacttgttccatctacttcccatctcgagctagttaccctatgaggtgacatgaagcgctcacggttactatgacggttagcttcacgactgttggtggcagtagcgtacgacttagctatagttccggacttaccataacttcgtatagcatacattatacgaagttatatcaggatattcttgtttaagatgttgaactctatggaggtttgtatgaactgatgatctaggaccggataagttcccttcttcatagcgaacttattcaaagaatgttttgtgtatcattcttgttacattgttattaatgaaaaaatattattggtcattggactgaacacgagtgttaaatatggaccaggccccaaataagatccattgatatatgaattaaataacaagaataaatcgagtcaccaaaccacttgccttttttaacgagacttgttcaccaacttgatacaaaagtcattatcctatgcaaatcaataatcatacaaaaatatccaataacactaaaaaattaaaagaaatggataatttcacaatatgttatacgataaagaagttacttttccaagaaattcactgattttataagcccacttgcattagataaatggcaaaaaaaaacaaaaaggaaaagaaataaagcacgaagaattctagaaaatacgaaatacgcttcaatgcagtgggacccacggttcaattattgccaattttcagctccaccgtatatttaaaaaataaaacgataatgctaaaaaaatataaatcgtaacgatcgttaaatctcaacggctggatcttatgacgaccgttagaaattgtggttgtcgacgagtcagtaataaacggcgtcaaagtggttgcagccggcacacacgagtcgtgtttatcaactcaaagcacaaatacttttcctcaacctaaaaataaggcaattagccaaaaacaactttgcgtgtaaacaacgctcaatacacgtgtcattttattattagctattgcttcaccgccttagctttctcgtgacctagtcgtcctcgtcttttcttcttcttcttctataaaacaatacccaaagagctcttcttcttcacaattcagatttcaatttctcaaaatcttaaaaactttctctcaattctctctaccgtgatcaaggtaaatttctgtgttccttattctctcaaaatcttcgattttgttttcgttcgatcccaatttcgtatatgttctttggtttagattctgttaatcttagatcgaagacgattttctgggtttgatcgttagatatcatcttaattctcgattagggtttcatagatatcatccgatttgttcaaataatttgagttttgtcgaataattactcttcgatttgtgatttctatctagatctggtgttagtttctagtttgtgcgatcgaatttgtcgattaatctgagtttttctgattaacaggtcgactttaacttagcctagcgaagttcctattccgaagttcctattctctagaaagtataggaacttcagatccaccgggatccccgatcatgcagaagctcatcaactctgtgcagaactacgcctggggctctaagaccgccttgaccgagttgtacgggatggagaacccttcctcacagcctatggccgagttgtggatgggtgctcaccctaagtcctcctccagagtgcagaacgctgctggagacattgtctccctcagagacgtgatcgagtccgacaagtccaccctgctgggagaggccgtcgctaagagattcggtgagttgcccttcttgttcaaggtcctctgcgctgctcagcccttgtctatccaagtgcaccctaacaagcacaactccgagatcggattcgccaaggagaacgctgctggcatccctatggacgcagctgagcgtaactacaaagaccctaaccacaagcccgagttggtgttcgctctcacccctttcttggccatgaacgctttccgcgagttctctgagattgtgtcactcctccagcccgttgctggtgctcaccctgctatcgctcacttcttgcagcagcctgacgctgagaggctctcagagctgttcgcttccctcctcaacatgcaaggcgaagagaagtccagagccctcgccatcctgaagtctgccctcgactctcagcagggagagccctggcagactattcgcctgatttccgagttctacccagaggactccgggttgttctctcccttgttgctcaacgtggtgaagctgaacccaggcgaggccatgttcttgttcgccgagactcctcacgcctacctccaaggagtggccctggaggtcatggccaactctgacaacgtccttagagctggccttactcctaaatacatcgacattcccgagctggtggccaacgtgaagttcgaggccaagcctgctaaccagttgctcacccagcccgttaagcagggagctgaactcgacttccctatccctgttgacgacttcgccttctccttgcacgacctctctgacaaggagactaccatatcccagcagtccgctgctatcctgttctgcgtggagggagacgctaccctgtggaaaggatctcagcagcttcagctgaagcctggagagtcagctttcattgctgccaacgagtcacctgtgactgtgaagggccacgggaggctcgccagagtctacaacaagttgtagaaacttatctctgttatgaatcagaagaagttcatgtctcgtttcatttaaaactttggtggtttgtgttttggggccttgtaaagcccctgatgaataattgttcaactatgtttccgttcctgtgttatacctttctttctaatgagtaatgacatcaaacttcttctgtattgaaattatgtccttgtgagtctctttatcatcgtttcgtctttacattatatgtgctacttttgtctaatgagcctgaaaagtggctccaatggtacgcactggaagatttgttggcttctggtagatatagcgacagtgttgagcttgtaatatcatgtctcttattgctaaattagttcctttcttaacagaaaccttcaaagtttttgtttttgttttcatttacctaatgtacacatacgctggccatgactaacaacatgtccaggcttagagcatatttttttctagcttaaattgttaacttgtcattcagtaaaatccgagaattgtgaagctctaattgaagctaattcgttttataaagtcagttaaaaagtatactaaattatccaacttttcttcaaaatctcaaaattctatgacaaaacgatagtctttgtttatgtcagtaccacaaagaggtggaaaaaaacaccaaaaaaacaataagcaaactatacactgagaagaaaaataaaagagagctcaatagatgttttatactaacggtagattagatcaaagatccaagctttactctacatagagcagaacccagaatcccttcatatctcttttattctagcaccgataatctactgaaaagaagacacttagagctctgtctctttgtcaaagaagtcccagccgtcatccagaagctccttacgttcattaacagagaagttcctattccgaagttcctattcttcaaaaagtataggaacttctgattccgatgacttcgtaggttcctagctcaagccgctcgtgtccaagcgtcacttacgattagctaatgattacggcatctaggaccgactagccgctaaagagattaataggcaaacttttgttgttgtgtaatataggattcaagtacaatcatggattagtgtaaaaaatactttgataataatttttttacttaaagaaagctaacaaaattttaacagaaaattttaaaaaaagtatcatatatatgctctaatctactaaagaaggaaagtgtgtaatttaacataagaggggtgagagtagtgtagttctcacatctttattaaaatatagaagtgttatttgttcttagatatattataattttaatgaatgattatgatgttgataaaatttattatgtaatatttgttattcatttcatttttttttcactatggtcatccgctgatttttcaaacctaaatctcagagtatcagtataatttactttaaaaaattgtataatttaaaataagaaaaaaataatattaaaatcttttaagatagaaagaaattattacataatgaactactac

SEQ ID NO: 146 - DNA, 4718 bp, synthetic construct
  misc_feature 1..4718: note = Guide sequence or cassette for donor insertion
  source 1..4718: mol_type = other DNA
gatgtgggacaagcacaaacatcacataaaataagtggacctaaaatcgttcatgccttagtttccaccattgatgatctctaccaatgaaacggaacatctcatcacaatgatggaccccaattccttacaacctggaactccttagctgttctagcacagcagagaaacaactacatgtgtggaagataacaaattatgtagaccccgtttgtgtccttgccttgggcactccattaatggtcccaaacctatgggaacaacagcaatacaaatgctgcttacatctctagattcatgtgtaattaagctaatttctctagtaaagtttatgtgcatacgttttatgtattttaatcgataaaaataacttgtttagaaaaaccatcttttacttcgtataaatttttatttataaaagattcttaaaaaataccaattgcagagctgcacttctcgtactcgagctagttaccctatgaggtgacatgaagcgctcacggttactatgacggttagcttcacgactgttggtggcagtagcgtacgacttagctatagttccggacttaccataacttcgtatagcatacattatacgaagttatatcaggatattcttgtttaagatgttgaactctatggaggtttgtatgaactgatgatctaggaccggataagttcccttcttcatagcgaacttattcaaagaatgttttgtgtatcattcttgttacattgttattaatgaaaaaatattattggtcattggactgaacacgagtgttaaatatggaccaggccccaaataagatccattgatatatgaattaaataacaagaataaatcgagtcaccaaaccacttgccttttttaacgagacttgttcaccaacttgatacaaaagtcattatcctatgcaaatcaataatcatacaaaaatatccaataacactaaaaaattaaaagaaatggataatttcacaatatgttatacgataaagaagttacttttccaagaaattcactgattttataagcccacttgcattagataaatggcaaaaaaaaacaaaaaggaaaagaaataaagcacgaagaattctagaaaatacgaaatacgcttcaatgcagtgggacccacggttcaattattgccaattttcagctccaccgtatatttaaaaaataaaacgataatgctaaaaaaatataaatcgtaacgatcgttaaatctcaacggctggatcttatgacgaccgttagaaattgtggttgtcgacgagtcagtaataaacggcgtcaaagtggttgcagccggcacacacgagtcgtgtttatcaactcaaagcacaaatacttttcctcaacctaaaaataaggcaattagccaaaaacaactttgcgtgtaaacaacgctcaatacacgtgtcattttattattagctattgcttcaccgccttagctttctcgtgacctagtcgtcctcgtcttttcttcttcttcttctataaaacaatacccaaagagctcttcttcttcacaattcagatttcaatttctcaaaatcttaaaaactttctctcaattctctctaccgtgatcaaggtaaatttctgtgttccttattctctcaaaatcttcgattttgttttcgttcgatcccaatttcgtatatgttctttggtttagattctgttaatcttagatcgaagacgattttctgggtttgatcgttagatatcatcttaattctcgattagggtttcatagatatcatccgatttgttcaaataatttgagttttgtcgaataattactcttcgatttgtgatttctatctagatctggtgttagtttctagtttgtgcgatcgaatttgtcgattaatctgagtttttctgattaacaggtcgactttaacttagcctagcgaagttcctattccgaagttcctattctctagaaagtataggaacttcagatccaccgggatccccgatcatgcagaagctcatcaactctgtgcagaactacgcctggggctctaagaccgccttgaccgagttgtacgggatggagaacccttcctcacagcctatggccgagttgtggatgggtgctcaccctaagtcctcctccagagtgcagaacgctgctggagacattgtctccctcagagacgtgatcgagtccgacaagtccaccctgctgggagaggccgtcgctaagagattcggtgagttgcccttcttgttcaaggtcctctgcgctgctcagcccttgtctatccaagtgcaccctaacaagcacaactccgagatcggattcgccaaggagaacgctgctggcatccctatggacgcagctgagcgtaactacaaagaccctaaccacaagcccgagttggtgttcgctctcacccctttcttggccatgaacgctttccgcgagttctctgagattgtgtcactcctccagcccgttgctggtgctcaccctgctatcgctcacttcttgcagcagcctgacgctgagaggctctcagagctgttcgcttccctcctcaacatgcaaggcgaagagaagtccagagccctcgccatcctgaagtctgccctcgactctcagcagggagagccctggcagactattcgcctgatttccgagttctacccagaggactccgggttgttctctcccttgttgctcaacgtggtgaagctgaacccaggcgaggccatgttcttgttcgccgagactcctcacgcctacctccaaggagtggccctggaggtcatggccaactctgacaacgtccttagagctggccttactcctaaatacatcgacattcccgagctggtggccaacgtgaagttcgaggccaagcctgctaaccagttgctcacccagcccgttaagcagggagctgaactcgacttccctatccctgttgacgacttcgccttctccttgcacgacctctctgacaaggagactaccatatcccagcagtccgctgctatcctgttctgcgtggagggagacgctaccctgtggaaaggatctcagcagcttcagctgaagcctggagagtcagctttcattgctgccaacgagtcacctgtgactgtgaagggccacgggaggctcgccagagtctacaacaagttgtagaaacttatctctgttatgaatcagaagaagttcatgtctcgtttcatttaaaactttggtggtttgtgttttggggccttgtaaagcccctgatgaataattgttcaactatgtttccgttcctgtgttatacctttctttctaatgagtaatgacatcaaacttcttctgtattgaaattatgtccttgtgagtctctttatcatcgtttcgtctttacattatatgtgctacttttgtctaatgagcctgaaaagtggctccaatggtacgcactggaagatttgttggcttctggtagatatagcgacagtgttgagcttgtaatatcatgtctcttattgctaaattagttcctttcttaacagaaaccttcaaagtttttgtttttgttttcatttacctaatgtacacatacgctggccatgactaacaacatgtccaggcttagagcatatttttttctagcttaaattgttaacttgtcattcagtaaaatccgagaattgtgaagctctaattgaagctaattcgttttataaagtcagttaaaaagtatactaaattatccaacttttcttcaaaatctcaaaattctatgacaaaacgatagtctttgtttatgtcagtaccacaaagaggtggaaaaaaacaccaaaaaaacaataagcaaactatacactgagaagaaaaataaaagagagctcaatagatgttttatactaacggtagattagatcaaagatccaagctttactctacatagagcagaacccagaatcccttcatatctcttttattctagcaccgataatctactgaaaagaagacacttagagctctgtctctttgtcaaagaagtcccagccatcatccagaagctccttacgttcattaacagatcccagccgtcatccagaagctccttacgttcattaacagagaagttcctattccgaagttcctattcttcaaaaagtataggaacttctgattccgatgacttcgtaggttcctagctcaagccgctcgtgtccaagcgtcacttacgattagctaatgattacggcatctaggaccgactaggtacggctacattggttttcattccctgttttcgagttttattgcagggtattttttttttcttctcccgtttcctagtaataaattttacctaagatatacagaaacacatgtagtattacaaaatttaaaacaaaataatgtatgacattatatataaaagctaaaacaacatttatatattaattattaaagaaacatttaaaattttattttaattcctattcaccactaagatgttagtttgagttaaaatgaactcaatctttttaactaaaatcttattttaaatcttataaatgaaaaatatataattaaaagttttttcttaagtaaagttttgttaaagataatcatttaagttttttttatatataatggatcgatcaatcgaattctttaacaaaaattttaatagataaatattacagtaaaaaaatctagtaccta

SEQ ID NO: 147 - DNA, 4656 bp, synthetic construct
  misc_feature 1..4656: note = Guide sequence or cassette for donor insertion
  source 1..4656: mol_type = other DNA
gtaaaattgattgagtgttcttgtagaacaatcgatttcaagcaaaactcatatttaaacttgagtaactgtaaaaaaaaaaaaaaaaaaaattgtctgccaaacttccgcacaaaccaatcgtgttcctcttttgttttctctcaatttctccctcattgctcaaccattttttaaatcagttgagggctttggtagataaaccaatctagcttgagcaagtcctatgctagaacttgatttttcgttcaagaatgaaagagaatatgtaaaaaaaaaaatgattcaacatactgttgcgcaaacgcagtttgttctttgtacttatttcttttttatcaaacctttcacgaaatttgttatggttttttcccccaacatgctggtcagtttcgagctagttaccctatgaggtgacatgaagcgctcacggttactatgacggttagcttcacgactgttggtggcagtagcgtacgacttagctatagttccggacttaccataacttcgtatagcatacattatacgaagttatatcaggatattcttgtttaagatgttgaactctatggaggtttgtatgaactgatgatctaggaccggataagttcccttcttcatagcgaacttattcaaagaatgttttgtgtatcattcttgttacattgttattaatgaaaaaatattattggtcattggactgaacacgagtgttaaatatggaccaggccccaaataagatccattgatatatgaattaaataacaagaataaatcgagtcaccaaaccacttgccttttttaacgagacttgttcaccaacttgatacaaaagtcattatcctatgcaaatcaataatcatacaaaaatatccaataacactaaaaaattaaaagaaatggataatttcacaatatgttatacgataaagaagttacttttccaagaaattcactgattttataagcccacttgcattagataaatggcaaaaaaaaacaaaaaggaaaagaaataaagcacgaagaattctagaaaatacgaaatacgcttcaatgcagtgggacccacggttcaattattgccaattttcagctccaccgtatatttaaaaaataaaacgataatgctaaaaaaatataaatcgtaacgatcgttaaatctcaacggctggatcttatgacgaccgttagaaattgtggttgtcgacgagtcagtaataaacggcgtcaaagtggttgcagccggcacacacgagtcgtgtttatcaactcaaagcacaaatacttttcctcaacctaaaaataaggcaattagccaaaaacaactttgcgtgtaaacaacgctcaatacacgtgtcattttattattagctattgcttcaccgccttagctttctcgtgacctagtcgtcctcgtcttttcttcttcttcttctataaaacaatacccaaagagctcttcttcttcacaattcagatttcaatttctcaaaatcttaaaaactttctctcaattctctctaccgtgatcaaggtaaatttctgtgttccttattctctcaaaatcttcgattttgttttcgttcgatcccaatttcgtatatgttctttggtttagattctgttaatcttagatcgaagacgattttctgggtttgatcgttagatatcatcttaattctcgattagggtttcatagatatcatccgatttgttcaaataatttgagttttgtcgaataattactcttcgatttgtgatttctatctagatctggtgttagtttctagtttgtgcgatcgaatttgtcgattaatctgagtttttctgattaacaggtcgactttaacttagcctagcgaagttcctattccgaagttcctattctctagaaagtataggaacttcagatccaccgggatccccgatcatgcagaagctcatcaactctgtgcagaactacgcctggggctctaagaccgccttgaccgagttgtacgggatggagaacccttcctcacagcctatggccgagttgtggatgggtgctcaccctaagtcctcctccagagtgcagaacgctgctggagacattgtctccctcagagacgtgatcgagtccgacaagtccaccctgctgggagaggccgtcgctaagagattcggtgagttgcccttcttgttcaaggtcctctgcgctgctcagcccttgtctatccaagtgcaccctaacaagcacaactccgagatcggattcgccaaggagaacgctgctggcatccctatggacgcagctgagcgtaactacaaagaccctaaccacaagcccgagttggtgttcgctctcacccctttcttggccatgaacgctttccgcgagttctctgagattgtgtcactcctccagcccgttgctggtgctcaccctgctatcgctcacttcttgcagcagcctgacgctgagaggctctcagagctgttcgcttccctcctcaacatgcaaggcgaagagaagtccagagccctcgccatcctgaagtctgccctcgactctcagcagggagagccctggcagactattcgcctgatttccgagttctacccagaggactccgggttgttctctcccttgttgctcaacgtggtgaagctgaacccaggcgaggccatgttcttgttcgccgagactcctcacgcctacctccaaggagtggccctggaggtcatggccaactctgacaacgtccttagagctggccttactcctaaatacatcgacattcccgagctggtggccaacgtgaagttcgaggccaagcctgctaaccagttgctcacccagcccgttaagcagggagctgaactcgacttccctatccctgttgacgacttcgccttctccttgcacgacctctctgacaaggagactaccatatcccagcagtccgctgctatcctgttctgcgtggagggagacgctaccctgtggaaaggatctcagcagcttcagctgaagcctggagagtcagctttcattgctgccaacgagtcacctgtgactgtgaagggccacgggaggctcgccagagtctacaacaagttgtagaaacttatctctgttatgaatcagaagaagttcatgtctcgtttcatttaaaactttggtggtttgtgttttggggccttgtaaagcccctgatgaataattgttcaactatgtttccgttcctgtgttatacctttctttctaatgagtaatgacatcaaacttcttctgtattgaaattatgtccttgtgagtctctttatcatcgtttcgtctttacattatatgtgctacttttgtctaatgagcctgaaaagtggctccaatggtacgcactggaagatttgttggcttctggtagatatagcgacagtgttgagcttgtaatatcatgtctcttattgctaaattagttcctttcttaacagaaaccttcaaagtttttgtttttgttttcatttacctaatgtacacatacgctggccatgactaacaacatgtccaggcttagagcatatttttttctagcttaaattgttaacttgtcattcagtaaaatccgagaattgtgaagctctaattgaagctaattcgttttataaagtcagttaaaaagtatactaaattatccaacttttcttcaaaatctcaaaattctatgacaaaacgatagtctttgtttatgtcagtaccacaaagaggtggaaaaaaacaccaaaaaaacaataagcaaactatacactgagaagaaaaataaaagagagctcaatagatgttttatactaacggtagattagatcaaagatccaagctttactctacatagagcagaacccagaatcccttcatatctcttttattctagcaccgataatctactgaaaagaagacacttagagctctgtctctttgtcaaagaagtcccagccgtcatccagaagctccttacgttcattaacagatcccagccgtcatccagaagctccttacgttcattaacagagaagttcctattccgaagttcctattcttcaaaaagtataggaacttctgattccgatgacttcgtaggttcctagctcaagccgctcgtgtccaagcgtcacttacgattagctaatgattacggcatctaggaccgactagcgcaggtcaactataaacatgttttctatcattcgggcgaacaagaggaactgacatgaaaacaaattgggagggaagctggattgtaatagtaaaaaattggggtagaaaaaatgaaagtgacaaaataatccataaattttttactgacaaataagtttattttattcatttcactaactaagcaataccatgtgcatttctcatgacaatttaatctaaaagtaccacaagcaaaaccatgaaagttaacagtgaaaagttatcgacaaaattatttagttatactttttaaacattaaaaggctaaaaattaatttttattttatttttaaaagactgaagcatgaacgcttaagaatttcaagaacaaatagatatttaccctaaaataattaaacaaggaaacaaacaaaaacggtattatggaatggagaagggtacttgggttgtgggac

SEQ ID NO: 148 - DNA, 4606 bp, synthetic construct
  misc_feature 1..4606: note = Guide sequence or cassette for donor insertion
  source 1..4606: mol_type = other DNA
gcaattcagatgctaaaatactagttgaacaataacttgattgatgataattaaatataccacaatactatatcatatattaaataataattttattttaaaatataaacttgtaattaatataaaatattttattatatattttaaaaataaatttataatacttaattaaataataaaaatacataatttttacgtgcaattcatttcaaaagtaaaactagaaaataaaaatgaaatatttttataaaataatattgattcaaaaagatttttatcactattttctattcagctttatcgtattttaaacaacttttatctccattaaagtttcaatggctaaacatctatccatgtggcaaatatgtattggtttgaccattctaggcagagcgcgtcgagctagttaccctatgaggtgacatgaagcgctcacggttactatgacggttagcttcacgactgttggtggcagtagcgtacgacttagctatagttccggacttaccataacttcgtatagcatacattatacgaagttatatcaggatattcttgtttaagatgttgaactctatggaggtttgtatgaactgatgatctaggaccggataagttcccttcttcatagcgaacttattcaaagaatgttttgtgtatcattcttgttacattgttattaatgaaaaaatattattggtcattggactgaacacgagtgttaaatatggaccaggccccaaataagatccattgatatatgaattaaataacaagaataaatcgagtcaccaaaccacttgccttttttaacgagacttgttcaccaacttgatacaaaagtcattatcctatgcaaatcaataatcatacaaaaatatccaataacactaaaaaattaaaagaaatggataatttcacaatatgttatacgataaagaagttacttttccaagaaattcactgattttataagcccacttgcattagataaatggcaaaaaaaaacaaaaaggaaaagaaataaagcacgaagaattctagaaaatacgaaatacgcttcaatgcagtgggacccacggttcaattattgccaattttcagctccaccgtatatttaaaaaataaaacgataatgctaaaaaaatataaatcgtaacgatcgttaaatctcaacggctggatcttatgacgaccgttagaaattgtggttgtcgacgagtcagtaataaacggcgtcaaagtggttgcagccggcacacacgagtcgtgtttatcaactcaaagcacaaatacttttcctcaacctaaaaataaggcaattagccaaaaacaactttgcgtgtaaacaacgctcaatacacgtgtcattttattattagctattgcttcaccgccttagctttctcgtgacctagtcgtcctcgtcttttcttcttcttcttctataaaacaatacccaaagagctcttcttcttcacaattcagatttcaatttctcaaaatcttaaaaactttctctcaattctctctaccgtgatcaaggtaaatttctgtgttccttattctctcaaaatcttcgattttgttttcgttcgatcccaatttcgtatatgttctttggtttagattctgttaatcttagatcgaagacgattttctgggtttgatcgttagatatcatcttaattctcgattagggtttcatagatatcatccgatttgttcaaataatttgagttttgtcgaataattactcttcgatttgtgatttctatctagatctggtgttagtttctagtttgtgcgatcgaatttgtcgattaatctgagtttttctgattaacaggtcgactttaacttagcctagcgaagttcctattccgaagttcctattctctagaaagtataggaacttcagatccaccgggatccccgatcatgcagaagctcatcaactctgtgcagaactacgcctggggctctaagaccgccttgaccgagttgtacgggatggagaacccttcctcacagcctatggccgagttgtggatgggtgctcaccctaagtcctcctccagagtgcagaacgctgctggagacattgtctccctcagagacgtgatcgagtccgacaagtccaccctgctgggagaggccgtcgctaagagattcggtgagttgcccttcttgttcaaggtcctctgcgctgctcagcccttgtctatccaagtgcaccctaacaagcacaactccgagatcggattcgccaaggagaacgctgctggcatccctatggacgcagctgagcgtaactacaaagaccctaaccacaagcccgagttggtgttcgctctcacccctttcttggccatgaacgctttccgcgagttctctgagattgtgtcactcctccagcccgttgctggtgctcaccctgctatcgctcacttcttgcagcagcctgacgctgagaggctctcagagctgttcgcttccctcctcaacatgcaaggcgaagagaagtccagagccctcgccatcctgaagtctgccctcgactctcagcagggagagccctggcagactattcgcctgatttccgagttctacccagaggactccgggttgttctctcccttgttgctcaacgtggtgaagctgaacccaggcgaggccatgttcttgttcgccgagactcctcacgcctacctccaaggagtggccctggaggtcatggccaactctgacaacgtccttagagctggccttactcctaaatacatcgacattcccgagctggtggccaacgtgaagttcgaggccaagcctgctaaccagttgctcacccagcccgttaagcagggagctgaactcgacttccctatccctgttgacgacttcgccttctccttgcacgacctctctgacaaggagactaccatatcccagcagtccgctgctatcctgttctgcgtggagggagacgctaccctgtggaaaggatctcagcagcttcagctgaagcctggagagtcagctttcattgctgccaacgagtcacctgtgactgtgaagggccacgggaggctcgccagagtctacaacaagttgtagaaacttatctctgttatgaatcagaagaagttcatgtctcgtttcatttaaaactttggtggtttgtgttttggggccttgtaaagcccctgatgaataattgttcaactatgtttccgttcctgtgttatacctttctttctaatgagtaatgacatcaaacttcttctgtattgaaattatgtccttgtgagtctctttatcatcgtttcgtctttacattatatgtgctacttttgtctaatgagcctgaaaagtggctccaatggtacgcactggaagatttgttggcttctggtagatatagcgacagtgttgagcttgtaatatcatgtctcttattgctaaattagttcctttcttaacagaaaccttcaaagtttttgtttttgttttcatttacctaatgtacacatacgctggccatgactaacaacatgtccaggcttagagcatatttttttctagcttaaattgttaacttgtcattcagtaaaatccgagaattgtgaagctctaattgaagctaattcgttttataaagtcagttaaaaagtatactaaattatccaacttttcttcaaaatctcaaaattctatgacaaaacgatagtctttgtttatgtcagtaccacaaagaggtggaaaaaaacaccaaaaaaacaataagcaaactatacactgagaagaaaaataaaagagagctcaatagatgttttatactaacggtagattagatcaaagatccaagctttactctacatagagcagaacccagaatcccttcatatctcttttattctagcaccgataatctactgaaaagaagacacttagagctctgtctctttgtcaaagaagtcccagccgtcatccagaagctccttacgttcattaacagatcccagccgtcatccagaagctccttacgttcattaacagagaagttcctattccgaagttcctattcttcaaaaagtataggaacttctgattccgatgacttcgtaggttcctagctcaagccgctcgtgtccaagcgtcacttacgattagctaatgattacggcatctaggaccgactagcaacggtatcactctcacgctcacaattgccacagagtgtggttggaaaaatgatggaaagaagaaacagaaacaaatctttaataaataaataaaatgattaatttatttttaaaaaaaagtatcaataaaaaaatttaaaggacttatttgttttcagttttaaattaaaaaaaaaacattttactaagagtattttataattaaaaaaattaaaacatcacgatgctatttcaatttttttattattcatttttttctattgttccatctttttttttctcatttacactcttttgtttccttctaaattaatttttttataattattttaagaaataactttaaaaaaactcaaaatcaaaacctcaataaacactgaaagttatttttgtcccat

SEQ ID NO: 149 - DNA, 4752 bp, synthetic construct
  misc_feature 1..4752: note = Guide sequence or cassette for donor insertion
  source 1..4752: mol_type = other DNA
tgaattaaattcagcgacccgtacgttgtccctgtctcgttcacaaccactttcttttttaacaatcattcacgaacacttattctttttaaatacctaattaatatttattatttttttattttcttatcacattatataatctataatatataatttattttcctctctcactaagtgtgtaatataacatgatgtctatgaattattgaaaaatattagtaacatattcattaatatatttttttattcaaattctttgttattgatttaaatgtattaaaagttacaaaataatgagaaagaaagtcattaaatactgaattttgtaatttttaacgaattttaacaataacaaaaaataagttcaaaagaatatattaaacatggtaacatttctgtaaatatattccctttttttgaagggaaagagtcagaaattcacattagtattgaatgcaggggctttttgatagtcttgctcgtccaccgtcgagctagttaccctatgaggtgacatgaagcgctcacggttactatgacggttagcttcacgactgttggtggcagtagcgtacgacttagctatagttccggacttaccataacttcgtatagcatacattatacgaagttatatcaggatattcttgtttaagatgttgaactctatggaggtttgtatgaactgatgatctaggaccggataagttcccttcttcatagcgaacttattcaaagaatgttttgtgtatcattcttgttacattgttattaatgaaaaaatattattggtcattggactgaacacgagtgttaaatatggaccaggccccaaataagatccattgatatatgaattaaataacaagaataaatcgagtcaccaaaccacttgccttttttaacgagacttgttcaccaacttgatacaaaagtcattatcctatgcaaatcaataatcatacaaaaatatccaataacactaaaaaattaaaagaaatggataatttcacaatatgttatacgataaagaagttacttttccaagaaattcactgattttataagcccacttgcattagataaatggcaaaaaaaaacaaaaaggaaaagaaataaagcacgaagaattctagaaaatacgaaatacgcttcaatgcagtgggacccacggttcaattattgccaattttcagctccaccgtatatttaaaaaataaaacgataatgctaaaaaaatataaatcgtaacgatcgttaaatctcaacggctggatcttatgacgaccgttagaaattgtggttgtcgacgagtcagtaataaacggcgtcaaagtggttgcagccggcacacacgagtcgtgtttatcaactcaaagcacaaatacttttcctcaacctaaaaataaggcaattagccaaaaacaactttgcgtgtaaacaacgctcaatacacgtgtcattttattattagctattgcttcaccgccttagctttctcgtgacctagtcgtcctcgtcttttcttcttcttcttctataaaacaatacccaaagagctcttcttcttcacaattcagatttcaatttctcaaaatcttaaaaactttctctcaattctctctaccgtgatcaaggtaaatttctgtgttccttattctctcaaaatcttcgattttgttttcgttcgatcccaatttcgtatatgttctttggtttagattctgttaatcttagatcgaagacgattttctgggtttgatcgttagatatcatcttaattctcgattagggtttcatagatatcatccgatttgttcaaataatttgagttttgtcgaataattactcttcgatttgtgatttctatctagatctggtgttagtttctagtttgtgcgatcgaatttgtcgattaatctgagtttttctgattaacaggtcgactttaacttagcctagcgaagttcctattccgaagttcctattctctagaaagtataggaacttcagatccaccgggatccccgatcatgcagaagctcatcaactctgtgcagaactacgcctggggctctaagaccgccttgaccgagttgtacgggatggagaacccttcctcacagcctatggccgagttgtggatgggtgctcaccctaagtcctcctccagagtgcagaacgctgctggagacattgtctccctcagagacgtgatcgagtccgacaagtccaccctgctgggagaggccgtcgctaagagattcggtgagttgcccttcttgttcaaggtcctctgcgctgctcagcccttgtctatccaagtgcaccctaacaagcacaactccgagatcggattcgccaaggagaacgctgctggcatccctatggacgcagctgagcgtaactacaaagaccctaaccacaagcccgagttggtgttcgctctcacccctttcttggccatgaacgctttccgcgagttctctgagattgtgtcactcctccagcccgttgctggtgctcaccctgctatcgctcacttcttgcagcagcctgacgctgagaggctctcagagctgttcgcttccctcctcaacatgcaaggcgaagagaagtccagagccctcgccatcctgaagtctgccctcgactctcagcagggagagccctggcagactattcgcctgatttccgagttctacccagaggactccgggttgttctctcccttgttgctcaacgtggtgaagctgaacccaggcgaggccatgttcttgttcgccgagactcctcacgcctacctccaaggagtggccctggaggtcatggccaactctgacaacgtccttagagctggccttactcctaaatacatcgacattcccgagctggtggccaacgtgaagttcgaggccaagcctgctaaccagttgctcacccagcccgttaagcagggagctgaactcgacttccctatccctgttgacgacttcgccttctccttgcacgacctctctgacaaggagactaccatatcccagcagtccgctgctatcctgttctgcgtggagggagacgctaccctgtggaaaggatctcagcagcttcagctgaagcctggagagtcagctttcattgctgccaacgagtcacctgtgactgtgaagggccacgggaggctcgccagagtctacaacaagttgtagaaacttatctctgttatgaatcagaagaagttcatgtctcgtttcatttaaaactttggtggtttgtgttttggggccttgtaaagcccctgatgaataattgttcaactatgtttccgttcctgtgttatacctttctttctaatgagtaatgacatcaaacttcttctgtattgaaattatgtccttgtgagtctctttatcatcgtttcgtctttacattatatgtgctacttttgtctaatgagcctgaaaagtggctccaatggtacgcactggaagatttgttggcttctggtagatatagcgacagtgttgagcttgtaatatcatgtctcttattgctaaattagttcctttcttaacagaaaccttcaaagtttttgtttttgttttcatttacctaatgtacacatacgctggccatgactaacaacatgtccaggcttagagcatatttttttctagcttaaattgttaacttgtcattcagtaaaatccgagaattgtgaagctctaattgaagctaattcgttttataaagtcagttaaaaagtatactaaattatccaacttttcttcaaaatctcaaaattctatgacaaaacgatagtctttgtttatgtcagtaccacaaagaggtggaaaaaaacaccaaaaaaacaataagcaaactatacactgagaagaaaaataaaagagagctcaatagatgttttatactaacggtagattagatcaaagatccaagctttactctacatagagcagaacccagaatcccttcatatctcttttattctagcaccgataatctactgaaaagaagacacttagagctctgtctctttgtcaaagaagtcccagccgtcatccagaagctccttacgttcattaacagatcccagccgtcatccagaagctccttacgttcattaacagagaagttcctattccgaagttcctattcttcaaaaagtataggaacttctgattccgatgacttcgtaggttcctagctcaagccgctcgtgtccaagcgtcacttacgattagctaatgattacggcatctaggaccgactagactcaccctgggctccggtgaatttcgttttaaatgtgctgctgtatcacaaagctaaacgacactaggtaccactacaccgctagattctgcgggccctcttccggaaggaaccatcaattttgtcaactgacaaattattcttttcactgcaagtgattttaaaaaataataattttgcttctttatttttttttttctgttcacttattttccatgcatacgatttgttttgttttgatcttgagcttatagactcattaatttcactcaattactaactagcaaaaacttccttatatagtttttattagaaatttcttaaaagcactttttaaagtcaatttaaattaagaattaatcacgtgtttttaaaaatttataaagaatttcgaaaaataattatttcagattgaagtggtttaaaaataccaagttaaacatgatacatagg

SEQ ID NO: 150 - DNA, 4774 bp, synthetic construct
  misc_feature 1..4774: note = Guide sequence or cassette for donor insertion
  source 1..4774: mol_type = other DNA
ggtagttgtcgcaactagatccaccttaaaacaaaaatatgttaaaaatagaagagtccccactcccgttaatatttattaaaaaaacattgaaaaaacttttttaaaaaatagtctttaaacattaaatttgggattagaagtgaattttgtatagagaaggtgttaacacattaccatgtttgtcctttaatttgttggatacaagggaaaagaaactttaagggaggggggagagacaactccaatgagatccaatccatatcttgttcgtcactggcgtatcttatttggaggaaccaaggggggcatgccccccaccaattattttataaaacaaatttttatatatatattaaaaattatttatatttttaataggtccttatcagatttttatagtatccgtaatttaaatttattaatttcttaattactaataattttataaaaaaaagtgagtgtttgggtgaggcctgagtggagtaaaccgcggtcgatcgagctagttaccctatgaggtgacatgaagcgctcacggttactatgacggttagcttcacgactgttggtggcagtagcgtacgacttagctatagttccggacttaccataacttcgtatagcatacattatacgaagttatatcaggatattcttgtttaagatgttgaactctatggaggtttgtatgaactgatgatctaggaccggataagttcccttcttcatagcgaacttattcaaagaatgttttgtgtatcattcttgttacattgttattaatgaaaaaatattattggtcattggactgaacacgagtgttaaatatggaccaggccccaaataagatccattgatatatgaattaaataacaagaataaatcgagtcaccaaaccacttgccttttttaacgagacttgttcaccaacttgatacaaaagtcattatcctatgcaaatcaataatcatacaaaaatatccaataacactaaaaaattaaaagaaatggataatttcacaatatgttatacgataaagaagttacttttccaagaaattcactgattttataagcccacttgcattagataaatggcaaaaaaaaacaaaaaggaaaagaaataaagcacgaagaattctagaaaatacgaaatacgcttcaatgcagtgggacccacggttcaattattgccaattttcagctccaccgtatatttaaaaaataaaacgataatgctaaaaaaatataaatcgtaacgatcgttaaatctcaacggctggatcttatgacgaccgttagaaattgtggttgtcgacgagtcagtaataaacggcgtcaaagtggttgcagccggcacacacgagtcgtgtttatcaactcaaagcacaaatacttttcctcaacctaaaaataaggcaattagccaaaaacaactttgcgtgtaaacaacgctcaatacacgtgtcattttattattagctattgcttcaccgccttagctttctcgtgacctagtcgtcctcgtcttttcttcttcttcttctataaaacaatacccaaagagctcttcttcttcacaattcagatttcaatttctcaaaatcttaaaaactttctctcaattctctctaccgtgatcaaggtaaatttctgtgttccttattctctcaaaatcttcgattttgttttcgttcgatcccaatttcgtatatgttctttggtttagattctgttaatcttagatcgaagacgattttctgggtttgatcgttagatatcatcttaattctcgattagggtttcatagatatcatccgatttgttcaaataatttgagttttgtcgaataattactcttcgatttgtgatttctatctagatctggtgttagtttctagtttgtgcgatcgaatttgtcgattaatctgagtttttctgattaacaggtcgactttaacttagcctagcgaagttcctattccgaagttcctattctctagaaagtataggaacttcagatccaccgggatccccgatcatgcagaagctcatcaactctgtgcagaactacgcctggggctctaagaccgccttgaccgagttgtacgggatggagaacccttcctcacagcctatggccgagttgtggatgggtgctcaccctaagtcctcctccagagtgcagaacgctgctggagacattgtctccctcagagacgtgatcgagtccgacaagtccaccctgctgggagaggccgtcgctaagagattcggtgagttgcccttcttgttcaaggtcctctgcgctgctcagcccttgtctatccaagtgcaccctaacaagcacaactccgagatcggattcgccaaggagaacgctgctggcatccctatggacgcagctgagcgtaactacaaagaccctaaccacaagcccgagttggtgttcgctctcacccctttcttggccatgaacgctttccgcgagttctctgagattgtgtcactcctccagcccgttgctggtgctcaccctgctatcgctcacttcttgcagcagcctgacgctgagaggctctcagagctgttcgcttccctcctcaacatgcaaggcgaagagaagtccagagccctcgccatcctgaagtctgccctcgactctcagcagggagagccctggcagactattcgcctgatttccgagttctacccagaggactccgggttgttctctcccttgttgctcaacgtggtgaagctgaacccaggcgaggccatgttcttgttcgccgagactcctcacgcctacctccaaggagtggccctggaggtcatggccaactctgacaacgtccttagagctggccttactcctaaatacatcgacattcccgagctggtggccaacgtgaagttcgaggccaagcctgctaaccagttgctcacccagcccgttaagcagggagctgaactcgacttccctatccctgttgacgacttcgccttctccttgcacgacctctctgacaaggagactaccatatcccagcagtccgctgctatcctgttctgcgtggagggagacgctaccctgtggaaaggatctcagcagcttcagctgaagcctggagagtcagctttcattgctgccaacgagtcacctgtgactgtgaagggccacgggaggctcgccagagtctacaacaagttgtagaaacttatctctgttatgaatcagaagaagttcatgtctcgtttcatttaaaactttggtggtttgtgttttggggccttgtaaagcccctgatgaataattgttcaactatgtttccgttcctgtgttatacctttctttctaatgagtaatgacatcaaacttcttctgtattgaaattatgtccttgtgagtctctttatcatcgtttcgtctttacattatatgtgctacttttgtctaatgagcctgaaaagtggctccaatggtacgcactggaagatttgttggcttctggtagatatagcgacagtgttgagcttgtaatatcatgtctcttattgctaaattagttcctttcttaacagaaaccttcaaagtttttgtttttgttttcatttacctaatgtacacatacgctggccatgactaacaacatgtccaggcttagagcatatttttttctagcttaaattgttaacttgtcattcagtaaaatccgagaattgtgaagctctaattgaagctaattcgttttataaagtcagttaaaaagtatactaaattatccaacttttcttcaaaatctcaaaattctatgacaaaacgatagtctttgtttatgtcagtaccacaaagaggtggaaaaaaacaccaaaaaaacaataagcaaactatacactgagaagaaaaataaaagagagctcaatagatgttttatactaacggtagattagatcaaagatccaagctttactctacatagagcagaacccagaatcccttcatatctcttttattctagcaccgataatctactgaaaagaagacacttagagctctgtctctttgtcaaagaagtcccagccgtcatccagaagctccttacgttcattaacagatcccagccgtcatccagaagctccttacgttcattaacagagaagttcctattccgaagttcctattcttcaaaaagtataggaacttctgattccgatgacttcgtaggttcctagctcaagccgctcgtgtccaagcgtcacttacgattagctaatgattacggcatctaggaccgactagactgggccgggttctggtggctggacacgtatagtaaatgttattttcctaggctgtatattaggttccctcttgtgtcaaagattgtaccctcctcttcctattgattcatgaaatactaaaaacaaataaacaatatgttatgttttccgatcgttcttttgcccatatatatagttgtacaacagatcgatgagggaaatgaaacacaaataaacttaatggtataattaaaaaagccattgttttattcacttcactagattttgaattgaactaaatgggaaactctaacgatcgatctatcagatcttgatttaagttttagaaggagtagtggtttgtgatcccagaggccgaaactgatgaaagagacagaatggagacaggagaaataagcaaagtccatatgataattgattgctgataagtggttgcaacgtagggatgataaattggcagaacaag

SEQ ID NO: 151 - DNA, 4765 bp, synthetic construct
  misc_feature 1..4765: note = Guide sequence or cassette for donor insertion
  source 1..4765: mol_type = other DNA
acgtatttgaagcaaataattcatctcatgcttgattaaggcatggttgaagtctcgagaggatatattaaatcttactttcagcattattttttttggtgtgtgtggaatgttcagaattcagaaatgaaattgttccgccatgattctagagtctggagtgcaatgtgcacctcgccaggttccgaagcaatgctgttgttgacctgcaatgcatagtacatgtgaatgtgatgctcataaagtgcgcacgtttattgtacccttcatacgccaccattattgcacggaatcccaaccaagatggaaatattgttaaatttctaacctttgcttcctccttaaaatgaaatatctatatcctaaaccaataggttagttatgggaagatgatggatcaaccactcacataaataaatcctcacagaaatgtaccaataaataatatgtgtgttcatacccagttcgagctagttaccctatgaggtgacatgaagcgctcacggttactatgacggttagcttcacgactgttggtggcagtagcgtacgacttagctatagttccggacttaccataacttcgtatagcatacattatacgaagttatatcaggatattcttgtttaagatgttgaactctatggaggtttgtatgaactgatgatctaggaccggataagttcccttcttcatagcgaacttattcaaagaatgttttgtgtatcattcttgttacattgttattaatgaaaaaatattattggtcattggactgaacacgagtgttaaatatggaccaggccccaaataagatccattgatatatgaattaaataacaagaataaatcgagtcaccaaaccacttgccttttttaacgagacttgttcaccaacttgatacaaaagtcattatcctatgcaaatcaataatcatacaaaaatatccaataacactaaaaaattaaaagaaatggataatttcacaatatgttatacgataaagaagttacttttccaagaaattcactgattttataagcccacttgcattagataaatggcaaaaaaaaacaaaaaggaaaagaaataaagcacgaagaattctagaaaatacgaaatacgcttcaatgcagtgggacccacggttcaattattgccaattttcagctccaccgtatatttaaaaaataaaacgataatgctaaaaaaatataaatcgtaacgatcgttaaatctcaacggctggatcttatgacgaccgttagaaattgtggttgtcgacgagtcagtaataaacggcgtcaaagtggttgcagccggcacacacgagtcgtgtttatcaactcaaagcacaaatacttttcctcaacctaaaaataaggcaattagccaaaaacaactttgcgtgtaaacaacgctcaatacacgtgtcattttattattagctattgcttcaccgccttagctttctcgtgacctagtcgtcctcgtcttttcttcttcttcttctataaaacaatacccaaagagctcttcttcttcacaattcagatttcaatttctcaaaatcttaaaaactttctctcaattctctctaccgtgatcaaggtaaatttctgtgttccttattctctcaaaatcttcgattttgttttcgttcgatcccaatttcgtatatgttctttggtttagattctgttaatcttagatcgaagacgattttctgggtttgatcgttagatatcatcttaattctcgattagggtttcatagatatcatccgatttgttcaaataatttgagttttgtcgaataattactcttcgatttgtgatttctatctagatctggtgttagtttctagtttgtgcgatcgaatttgtcgattaatctgagtttttctgattaacaggtcgactttaacttagcctagcgaagttcctattccgaagttcctattctctagaaagtataggaacttcagatccaccgggatccccgatcatgcagaagctcatcaactctgtgcagaactacgcctggggctctaagaccgccttgaccgagttgtacgggatggagaacccttcctcacagcctatggccgagttgtggatgggtgctcaccctaagtcctcctccagagtgcagaacgctgctggagacattgtctccctcagagacgtgatcgagtccgacaagtccaccctgctgggagaggccgtcgctaagagattcggtgagttgcccttcttgttcaaggtcctctgcgctgctcagcccttgtctatccaagtgcaccctaacaagcacaactccgagatcggattcgccaaggagaacgctgctggcatccctatggacgcagctgagcgtaactacaaagaccctaaccacaagcccgagttggtgttcgctctcacccctttcttggccatgaacgctttccgcgagttctctgagattgtgtcactcctccagcccgttgctggtgctcaccctgctatcgctcacttcttgcagcagcctgacgctgagaggctctcagagctgttcgcttccctcctcaacatgcaaggcgaagagaagtccagagccctcgccatcctgaagtctgccctcgactctcagcagggagagccctggcagactattcgcctgatttccgagttctacccagaggactccgggttgttctctcccttgttgctcaacgtggtgaagctgaacccaggcgaggccatgttcttgttcgccgagactcctcacgcctacctccaaggagtggccctggaggtcatggccaactctgacaacgtccttagagctggccttactcctaaatacatcgacattcccgagctggtggccaacgtgaagttcgaggccaagcctgctaaccagttgctcacccagcccgttaagcagggagctgaactcgacttccctatccctgttgacgacttcgccttctccttgcacgacctctctgacaaggagactaccatatcccagcagtccgctgctatcctgttctgcgtggagggagacgctaccctgtggaaaggatctcagcagcttcagctgaagcctggagagtcagctttcattgctgccaacgagtcacctgtgactgtgaagggccacgggaggctcgccagagtctacaacaagttgtagaaacttatctctgttatgaatcagaagaagttcatgtctcgtttcatttaaaactttggtggtttgtgttttggggccttgtaaagcccctgatgaataattgttcaactatgtttccgttcctgtgttatacctttctttctaatgagtaatgacatcaaacttcttctgtattgaaattatgtccttgtgagtctctttatcatcgtttcgtctttacattatatgtgctacttttgtctaatgagcctgaaaagtggctccaatggtacgcactggaagatttgttggcttctggtagatatagcgacagtgttgagcttgtaatatcatgtctcttattgctaaattagttcctttcttaacagaaaccttcaaagtttttgtttttgttttcatttacctaatgtacacatacgctggccatgactaacaacatgtccaggcttagagcatatttttttctagcttaaattgttaacttgtcattcagtaaaatccgagaattgtgaagctctaattgaagctaattcgttttataaagtcagttaaaaagtatactaaattatccaacttttcttcaaaatctcaaaattctatgacaaaacgatagtctttgtttatgtcagtaccacaaagaggtggaaaaaaacaccaaaaaaacaataagcaaactatacactgagaagaaaaataaaagagagctcaatagatgttttatactaacggtagattagatcaaagatccaagctttactctacatagagcagaacccagaatcccttcatatctcttttattctagcaccgataatctactgaaaagaagacacttagagctctgtctctttgtcaaagaagtcccagccgtcatccagaagctccttacgttcattaacagatcccagccgtcatccagaagctccttacgttcattaacagagaagttcctattccgaagttcctattcttcaaaaagtataggaacttctgattccgatgacttcgtaggttcctagctcaagccgctcgtgtccaagcgtcacttacgattagctaatgattacggcatctaggaccgactagaggatcgacccctaataacatggggcttgaatagtaagcataaagttaattataagtttaaatctcaatgcggttattacatagtaaaaaataaatatttgttatactttatgtcattaccaattatatataataagtttatttaccataaaaattgtataaaaacaatttttaattagttaataatataatttttttactggcaaattcacctggtccattttattttttttgtgtacgagaattttaaaaataaaaaaaaaatggtccctcactctcatatcagagggacctgcatggaaattaaaagtaaatggtaagatccgggaaaggccgtatctggtgctgccaagttgcatagacagacacgtataaaagactatcagtatctctttaccaatgccgaacttagagttatgagaatcgtcaaaacgattaatgactcctactgtttaagtaaagtcctatccatcattaaccgtatatgggtgtga

SEQ ID NO: 152 - DNA, 4590 bp, synthetic construct
  misc_feature 1..4590: note = Guide sequence or cassette for donor insertion
  source 1..4590: mol_type = other DNA
agatccaaaactataaatgaaaatcactaatttcatatgtcaccaagaactctaatgaatttatacatacatttgatgcaacttgacatttaatttgtttttctaaggtttgcatagaatttgtacgtatttgaattcttgtactcagagattgaaaaacaagctacattctgatatttgaaattggtttcggaattcatgtctaacaaattgaactgtaaatcaaacatgctcttacttgtgacaagacaaagcaataacttgcccaatctgcaagatggatagtataatgatacattgagaagaatcaaagggagaagaaatgcttattccatgaaaacaaaaattatgaagctatttttaagcttgtccatccaggtagagatgaaaacgttcacgtcgaactaatcgagctagttaccctatgaggtgacatgaagcgctcacggttactatgacggttagcttcacgactgttggtggcagtagcgtacgacttagctatagttccggacttaccataacttcgtatagcatacattatacgaagttatatcaggatattcttgtttaagatgttgaactctatggaggtttgtatgaactgatgatctaggaccggataagttcccttcttcatagcgaacttattcaaagaatgttttgtgtatcattcttgttacattgttattaatgaaaaaatattattggtcattggactgaacacgagtgttaaatatggaccaggccccaaataagatccattgatatatgaattaaataacaagaataaatcgagtcaccaaaccacttgccttttttaacgagacttgttcaccaacttgatacaaaagtcattatcctatgcaaatcaataatcatacaaaaatatccaataacactaaaaaattaaaagaaatggataatttcacaatatgttatacgataaagaagttacttttccaagaaattcactgattttataagcccacttgcattagataaatggcaaaaaaaaacaaaaaggaaaagaaataaagcacgaagaattctagaaaatacgaaatacgcttcaatgcagtgggacccacggttcaattattgccaattttcagctccaccgtatatttaaaaaataaaacgataatgctaaaaaaatataaatcgtaacgatcgttaaatctcaacggctggatcttatgacgaccgttagaaattgtggttgtcgacgagtcagtaataaacggcgtcaaagtggttgcagccggcacacacgagtcgtgtttatcaactcaaagcacaaatacttttcctcaacctaaaaataaggcaattagccaaaaacaactttgcgtgtaaacaacgctcaatacacgtgtcattttattattagctattgcttcaccgccttagctttctcgtgacctagtcgtcctcgtcttttcttcttcttcttctataaaacaatacccaaagagctcttcttcttcacaattcagatttcaatttctcaaaatcttaaaaactttctctcaattctctctaccgtgatcaaggtaaatttctgtgttccttattctctcaaaatcttcgattttgttttcgttcgatcccaatttcgtatatgttctttggtttagattctgttaatcttagatcgaagacgattttctgggtttgatcgttagatatcatcttaattctcgattagggtttcatagatatcatccgatttgttcaaataatttgagttttgtcgaataattactcttcgatttgtgatttctatctagatctggtgttagtttctagtttgtgcgatcgaatttgtcgattaatctgagtttttctgattaacaggtcgactttaacttagcctagcgaagttcctattccgaagttcctattctctagaaagtataggaacttcagatccaccgggatccccgatcatgcagaagctcatcaactctgtgcagaactacgcctggggctctaagaccgccttgaccgagttgtacgggatggagaacccttcctcacagcctatggccgagttgtggatgggtgctcaccctaagtcctcctccagagtgcagaacgctgctggagacattgtctccctcagagacgtgatcgagtccgacaagtccaccctgctgggagaggccgtcgctaagagattcggtgagttgcccttcttgttcaaggtcctctgcgctgctcagcccttgtctatccaagtgcaccctaacaagcacaactccgagatcggattcgccaaggagaacgctgctggcatccctatggacgcagctgagcgtaactacaaagaccctaaccacaagcccgagttggtgttcgctctcacccctttcttggccatgaacgctttccgcgagttctctgagattgtgtcactcctccagcccgttgctggtgctcaccctgctatcgctcacttcttgcagcagcctgacgctgagaggctctcagagctgttcgcttccctcctcaacatgcaaggcgaagagaagtccagagccctcgccatcctgaagtctgccctcgactctcagcagggagagccctggcagactattcgcctgatttccgagttctacccagaggactccgggttgttctctcccttgttgctcaacgtggtgaagctgaacccaggcgaggccatgttcttgttcgccgagactcctcacgcctacctccaaggagtggccctggaggtcatggccaactctgacaacgtccttagagctggccttactcctaaatacatcgacattcccgagctggtggccaacgtgaagttcgaggccaagcctgctaaccagttgctcacccagcccgttaagcagggagctgaactcgacttccctatccctgttgacgacttcgccttctccttgcacgacctctctgacaaggagactaccatatcccagcagtccgctgctatcctgttctgcgtggagggagacgctaccctgtggaaaggatctcagcagcttcagctgaagcctggagagtcagctttcattgctgccaacgagtcacctgtgactgtgaagggccacgggaggctcgccagagtctacaacaagttgtagaaacttatctctgttatgaatcagaagaagttcatgtctcgtttcatttaaaactttggtggtttgtgttttggggccttgtaaagcccctgatgaataattgttcaactatgtttccgttcctgtgttatacctttctttctaatgagtaatgacatcaaacttcttctgtattgaaattatgtccttgtgagtctctttatcatcgtttcgtctttacattatatgtgctacttttgtctaatgagcctgaaaagtggctccaatggtacgcactggaagatttgttggcttctggtagatatagcgacagtgttgagcttgtaatatcatgtctcttattgctaaattagttcctttcttaacagaaaccttcaaagtttttgtttttgttttcatttacctaatgtacacatacgctggccatgactaacaacatgtccaggcttagagcatatttttttctagcttaaattgttaacttgtcattcagtaaaatccgagaattgtgaagctctaattgaagctaattcgttttataaagtcagttaaaaagtatactaaattatccaacttttcttcaaaatctcaaaattctatgacaaaacgatagtctttgtttatgtcagtaccacaaagaggtggaaaaaaacaccaaaaaaacaataagcaaactatacactgagaagaaaaataaaagagagctcaatagatgttttatactaacggtagattagatcaaagatccaagctttactctacatagagcagaacccagaatcccttcatatctcttttattctagcaccgataatctactgaaaagaagacacttagagctctgtctctttgtcaaagaagtcccagccgtcatccagaagctccttacgttcattaacagatcccagccgtcatccagaagctccttacgttcattaacagagaagttcctattccgaagttcctattcttcaaaaagtataggaacttctgattccgatgacttcgtaggttcctagctcaagccgctcgtgtccaagcgtcacttacgattagctaatgattacggcatctaggaccgactagaacaggtttataatagtctttgaagttgttggtaataaagatagattgcagttgccattttcattgataaattgcaagtaacttttacgtcagtaatatagaagtattaaaaaaaaattgtcagaaaataatagttgacatttccacggataaatattatgaaatcttacttaatatttttatgtatgaagacgttacagacaacttctttcccgataataaatggacttttccatcgataaattaaaatacgtttttctttagatgtacatatatgttacaaagagctttttgattgataatacaaagggtattagagtgagtttttcagtcattaaattatgatattatagtattattttataccaattttgtg

SEQ ID NO: 153 - DNA, 4741 bp, synthetic construct
  misc_feature 1..4741: note = Guide sequence or cassette for donor insertion
  source 1..4741: mol_type = other DNA
tcgccaaagcctgtcaactggacgacgcaatgcaagaacaacttcatcattgctttggcgttttttctttgaaatgtgcattttttttttccattcagtgtgagtagttcttcgttcattttattataatggttgtgtaaaaaataattatcccatcaaaataatttctattttaattttttaataatatttttttacttatattttttataatattaatgatggattacaaaaatctataaatatattaatgataatataagattaattttatgaaattattactctttctattctcttttataagcaaaacatatttcaattttttttttctaaatataagcaaaacttcttttttatttaataatattattattttgtttatggaaaacaataaggaggataagaagtatgagtttccaattcacacagccacatgtaaaccttaacattgactagtgaccaccatccacgcgacgtgtgttacggctcgagctagttaccctatgaggtgacatgaagcgctcacggttactatgacggttagcttcacgactgttggtggcagtagcgtacgacttagctatagttccggacttaccataacttcgtatagcatacattatacgaagttatatcaggatattcttgtttaagatgttgaactctatggaggtttgtatgaactgatgatctaggaccggataagttcccttcttcatagcgaacttattcaaagaatgttttgtgtatcattcttgttacattgttattaatgaaaaaatattattggtcattggactgaacacgagtgttaaatatggaccaggccccaaataagatccattgatatatgaattaaataacaagaataaatcgagtcaccaaaccacttgccttttttaacgagacttgttcaccaacttgatacaaaagtcattatcctatgcaaatcaataatcatacaaaaatatccaataacactaaaaaattaaaagaaatggataatttcacaatatgttatacgataaagaagttacttttccaagaaattcactgattttataagcccacttgcattagataaatggcaaaaaaaaacaaaaaggaaaagaaataaagcacgaagaattctagaaaatacgaaatacgcttcaatgcagtgggacccacggttcaattattgccaattttcagctccaccgtatatttaaaaaataaaacgataatgctaaaaaaatataaatcgtaacgatcgttaaatctcaacggctggatcttatgacgaccgttagaaattgtggttgtcgacgagtcagtaataaacggcgtcaaagtggttgcagccggcacacacgagtcgtgtttatcaactcaaagcacaaatacttttcctcaacctaaaaataaggcaattagccaaaaacaactttgcgtgtaaacaacgctcaatacacgtgtcattttattattagctattgcttcaccgccttagctttctcgtgacctagtcgtcctcgtcttttcttcttcttcttctataaaacaatacccaaagagctcttcttcttcacaattcagatttcaatttctcaaaatcttaaaaactttctctcaattctctctaccgtgatcaaggtaaatttctgtgttccttattctctcaaaatcttcgattttgttttcgttcgatcccaatttcgtatatgttctttggtttagattctgttaatcttagatcgaagacgattttctgggtttgatcgttagatatcatcttaattctcgattagggtttcatagatatcatccgatttgttcaaataatttgagttttgtcgaataattactcttcgatttgtgatttctatctagatctggtgttagtttctagtttgtgcgatcgaatttgtcgattaatctgagtttttctgattaacaggtcgactttaacttagcctagcgaagttcctattccgaagttcctattctctagaaagtataggaacttcagatccaccgggatccccgatcatgcagaagctcatcaactctgtgcagaactacgcctggggctctaagaccgccttgaccgagttgtacgggatggagaacccttcctcacagcctatggccgagttgtggatgggtgctcaccctaagtcctcctccagagtgcagaacgctgctggagacattgtctccctcagagacgtgatcgagtccgacaagtccaccctgctgggagaggccgtcgctaagagattcggtgagttgcccttcttgttcaaggtcctctgcgctgctcagcccttgtctatccaagtgcaccctaacaagcacaactccgagatcggattcgccaaggagaacgctgctggcatccctatggacgcagctgagcgtaactacaaagaccctaaccacaagcccgagttggtgttcgctctcacccctttcttggccatgaacgctttccgcgagttctctgagattgtgtcactcctccagcccgttgctggtgctcaccctgctatcgctcacttcttgcagcagcctgacgctgagaggctctcagagctgttcgcttccctcctcaacatgcaaggcgaagagaagtccagagccctcgccatcctgaagtctgccctcgactctcagcagggagagccctggcagactattcgcctgatttccgagttctacccagaggactccgggttgttctctcccttgttgctcaacgtggtgaagctgaacccaggcgaggccatgttcttgttcgccgagactcctcacgcctacctccaaggagtggccctggaggtcatggccaactctgacaacgtccttagagctggccttactcctaaatacatcgacattcccgagctggtggccaacgtgaagttcgaggccaagcctgctaaccagttgctcacccagcccgttaagcagggagctgaactcgacttccctatccctgttgacgacttcgccttctccttgcacgacctctctgacaaggagactaccatatcccagcagtccgctgctatcctgttctgcgtggagggagacgctaccctgtggaaaggatctcagcagcttcagctgaagcctggagagtcagctttcattgctgccaacgagtcacctgtgactgtgaagggccacgggaggctcgccagagtctacaacaagttgtagaaacttatctctgttatgaatcagaagaagttcatgtctcgtttcatttaaaactttggtggtttgtgttttggggccttgtaaagcccctgatgaataattgttcaactatgtttccgttcctgtgttatacctttctttctaatgagtaatgacatcaaacttcttctgtattgaaattatgtccttgtgagtctctttatcatcgtttcgtctttacattatatgtgctacttttgtctaatgagcctgaaaagtggctccaatggtacgcactggaagatttgttggcttctggtagatatagcgacagtgttgagcttgtaatatcatgtctcttattgctaaattagttcctttcttaacagaaaccttcaaagtttttgtttttgttttcatttacctaatgtacacatacgctggccatgactaacaacatgtccaggcttagagcatatttttttctagcttaaattgttaacttgtcattcagtaaaatccgagaattgtgaagctctaattgaagctaattcgttttataaagtcagttaaaaagtatactaaattatccaacttttcttcaaaatctcaaaattctatgacaaaacgatagtctttgtttatgtcagtaccacaaagaggtggaaaaaaacaccaaaaaaacaataagcaaactatacactgagaagaaaaataaaagagagctcaatagatgttttatactaacggtagattagatcaaagatccaagctttactctacatagagcagaacccagaatcccttcatatctcttttattctagcaccgataatctactgaaaagaagacacttagagctctgtctctttgtcaaagaagtcccagccgtcatccagaagctccttacgttcattaacagatcccagccgtcatccagaagctccttacgttcattaacagagaagttcctattccgaagttcctattcttcaaaaagtataggaacttctgattccgatgacttcgtaggttcctagctcaagccgctcgtgtccaagcgtcacttacgattagctaatgattacggcatctaggaccgactaggaggggtgttgtcagctgtcagtaaccattgccttaagtcaaccctgccacacggaacagcccttacaatttaacttctaaaaattacatctatgttattttcatctctaaaaatgtagtacatgcattatttaatgttaaaaaatgttaacttactaataaaatttactatatataattagatttagtctttaagagactaaactaacatatgttgttcaacattcggatatataccaaattataatatatatattaaatcacatgacaactattatatatggtgttgttattattacaatagtacgtaaggcatcttgttatacattattatatacgagaaaaggaatgagaaaaatgatcaaaatcatcgtaagaatgtatatatgttttggtaaattttgcaattagtattatgtgaatcatcgtaagaatgtatatatgt

SEQ ID NO: 154 - DNA, 4600 bp, synthetic construct
  misc_feature 1..4600: note = Guide sequence or cassette for donor insertion
  source 1..4600: mol_type = other DNA
cactataagtatccaatttggttcaattggcttgatttgactcttcatccacaccctttaaaagtagaataaaataatctataaagcagcaaaataaaagtcaaataagcataaactgatttttaacttgaaaaagaaaagaaataagaagctagagaaagacttcgagtaggtcatgcgtgaaacgttaagagaccaagcaaaccaatgaaatggaaccaactatatataatcaccaactgtttctaattatatatactgtacaagaacaaacataagtcagcaaaacttctattaattaagtttactgcattaaaaagcttaagacccacaagccgaccttagccatgaaggtttttggggctttttagccctttgggctttttaatgcgtgccttttggccctgcggcccacgctggccagggtcgagctagttaccctatgaggtgacatgaagcgctcacggttactatgacggttagcttcacgactgttggtggcagtagcgtacgacttagctatagttccggacttaccataacttcgtatagcatacattatacgaagttatatcaggatattcttgtttaagatgttgaactctatggaggtttgtatgaactgatgatctaggaccggataagttcccttcttcatagcgaacttattcaaagaatgttttgtgtatcattcttgttacattgttattaatgaaaaaatattattggtcattggactgaacacgagtgttaaatatggaccaggccccaaataagatccattgatatatgaattaaataacaagaataaatcgagtcaccaaaccacttgccttttttaacgagacttgttcaccaacttgatacaaaagtcattatcctatgcaaatcaataatcatacaaaaatatccaataacactaaaaaattaaaagaaatggataatttcacaatatgttatacgataaagaagttacttttccaagaaattcactgattttataagcccacttgcattagataaatggcaaaaaaaaacaaaaaggaaaagaaataaagcacgaagaattctagaaaatacgaaatacgcttcaatgcagtgggacccacggttcaattattgccaattttcagctccaccgtatatttaaaaaataaaacgataatgctaaaaaaatataaatcgtaacgatcgttaaatctcaacggctggatcttatgacgaccgttagaaattgtggttgtcgacgagtcagtaataaacggcgtcaaagtggttgcagccggcacacacgagtcgtgtttatcaactcaaagcacaaatacttttcctcaacctaaaaataaggcaattagccaaaaacaactttgcgtgtaaacaacgctcaatacacgtgtcattttattattagctattgcttcaccgccttagctttctcgtgacctagtcgtcctcgtcttttcttcttcttcttctataaaacaatacccaaagagctcttcttcttcacaattcagatttcaatttctcaaaatcttaaaaactttctctcaattctctctaccgtgatcaaggtaaatttctgtgttccttattctctcaaaatcttcgattttgttttcgttcgatcccaatttcgtatatgttctttggtttagattctgttaatcttagatcgaagacgattttctgggtttgatcgttagatatcatcttaattctcgattagggtttcatagatatcatccgatttgttcaaataatttgagttttgtcgaataattactcttcgatttgtgatttctatctagatctggtgttagtttctagtttgtgcgatcgaatttgtcgattaatctgagtttttctgattaacaggtcgactttaacttagcctagcgaagttcctattccgaagttcctattctctagaaagtataggaacttcagatccaccgggatccccgatcatgcagaagctcatcaactctgtgcagaactacgcctggggctctaagaccgccttgaccgagttgtacgggatggagaacccttcctcacagcctatggccgagttgtggatgggtgctcaccctaagtcctcctccagagtgcagaacgctgctggagacattgtctccctcagagacgtgatcgagtccgacaagtccaccctgctgggagaggccgtcgctaagagattcggtgagttgcccttcttgttcaaggtcctctgcgctgctcagcccttgtctatccaagtgcaccctaacaagcacaactccgagatcggattcgccaaggagaacgctgctggcatccctatggacgcagctgagcgtaactacaaagaccctaaccacaagcccgagttggtgttcgctctcacccctttcttggccatgaacgctttccgcgagttctctgagattgtgtcactcctccagcccgttgctggtgctcaccctgctatcgctcacttcttgcagcagcctgacgctgagaggctctcagagctgttcgcttccctcctcaacatgcaaggcgaagagaagtccagagccctcgccatcctgaagtctgccctcgactctcagcagggagagccctggcagactattcgcctgatttccgagttctacccagaggactccgggttgttctctcccttgttgctcaacgtggtgaagctgaacccaggcgaggccatgttcttgttcgccgagactcctcacgcctacctccaaggagtggccctggaggtcatggccaactctgacaacgtccttagagctggccttactcctaaatacatcgacattcccgagctggtggccaacgtgaagttcgaggccaagcctgctaaccagttgctcacccagcccgttaagcagggagctgaactcgacttccctatccctgttgacgacttcgccttctccttgcacgacctctctgacaaggagactaccatatcccagcagtccgctgctatcctgttctgcgtggagggagacgctaccctgtggaaaggatctcagcagcttcagctgaagcctggagagtcagctttcattgctgccaacgagtcacctgtgactgtgaagggccacgggaggctcgccagagtctacaacaagttgtagaaacttatctctgttatgaatcagaagaagttcatgtctcgtttcatttaaaactttggtggtttgtgttttggggccttgtaaagcccctgatgaataattgttcaactatgtttccgttcctgtgttatacctttctttctaatgagtaatgacatcaaacttcttctgtattgaaattatgtccttgtgagtctctttatcatcgtttcgtctttacattatatgtgctacttttgtctaatgagcctgaaaagtggctccaatggtacgcactggaagatttgttggcttctggtagatatagcgacagtgttgagcttgtaatatcatgtctcttattgctaaattagttcctttcttaacagaaaccttcaaagtttttgtttttgttttcatttacctaatgtacacatacgctggccatgactaacaacatgtccaggcttagagcatatttttttctagcttaaattgttaacttgtcattcagtaaaatccgagaattgtgaagctctaattgaagctaattcgttttataaagtcagttaaaaagtatactaaattatccaacttttcttcaaaatctcaaaattctatgacaaaacgatagtctttgtttatgtcagtaccacaaagaggtggaaaaaaacaccaaaaaaacaataagcaaactatacactgagaagaaaaataaaagagagctcaatagatgttttatactaacggtagattagatcaaagatccaagctttactctacatagagcagaacccagaatcccttcatatctcttttattctagcaccgataatctactgaaaagaagacacttagagctctgtctctttgtcaaagaagtcccagccgtcatccagaagctccttacgttcattaacagagaagttcctattccgaagttcctattcttcaaaaagtataggaacttctgattccgatgacttcgtaggttcctagctcaagccgctcgtgtccaagcgtcacttacgattagctaatgattacggcatctaggaccgactagtctagctgggccaagtcgatccattttgatgactctaggaagcatgcatggcatcaagaaattaaaatctagattcaacactatatttgtgagactcattctttttcaacacacgtatggctactattattgaggaaaaatgaagtgaatgatgtacatgccactcataatgatcaagatgaagggatatacgggtgaacattcttactaactgtttttatttatttatgaatctatggtatgcaatacatcacgacaagacccaggcattccaacaactttagcactccaagaccaattgatcccctgacattgcagtattattaagaaaaagaaaaataaaaacaaactcatggtaggattagaccaagagccatgaaaaatcaacagaatttgaaatcagttaaac

SEQ ID NO: 155 - DNA, 4586 bp, synthetic construct
  misc_feature 1..4586: note = Guide sequence or cassette for donor insertion
  source 1..4586: mol_type = other DNA
catgtggttgtttgggattcttcaaccgatgtaaatcccatcgatgtagtaagtcaggattttttaaatggcttataaaataatcaatgttaaatgttctcctcagacctgcttcaacaatcaaatcttagtactcaatgagacccacatactcctctaatctcacaccaaatttggagcacattccacagatccagccacagccactacactatccatcatcatgaacctagacgaaagaacggattcattgtgactatatatgtgggtttcgaatatatagcattttcgtaccaatatgcattgtgcggtttcggaattaacattcttttttctctttcctttgctttcttatcctgattttctttttggataccattttcgctttataccatccgtattcgagctagttaccctatgaggtgacatgaagcgctcacggttactatgacggttagcttcacgactgttggtggcagtagcgtacgacttagctatagttccggacttaccataacttcgtatagcatacattatacgaagttatatcaggatattcttgtttaagatgttgaactctatggaggtttgtatgaactgatgatctaggaccggataagttcccttcttcatagcgaacttattcaaagaatgttttgtgtatcattcttgttacattgttattaatgaaaaaatattattggtcattggactgaacacgagtgttaaatatggaccaggccccaaataagatccattgatatatgaattaaataacaagaataaatcgagtcaccaaaccacttgccttttttaacgagacttgttcaccaacttgatacaaaagtcattatcctatgcaaatcaataatcatacaaaaatatccaataacactaaaaaattaaaagaaatggataatttcacaatatgttatacgataaagaagttacttttccaagaaattcactgattttataagcccacttgcattagataaatggcaaaaaaaaacaaaaaggaaaagaaataaagcacgaagaattctagaaaatacgaaatacgcttcaatgcagtgggacccacggttcaattattgccaattttcagctccaccgtatatttaaaaaataaaacgataatgctaaaaaaatataaatcgtaacgatcgttaaatctcaacggctggatcttatgacgaccgttagaaattgtggttgtcgacgagtcagtaataaacggcgtcaaagtggttgcagccggcacacacgagtcgtgtttatcaactcaaagcacaaatacttttcctcaacctaaaaataaggcaattagccaaaaacaactttgcgtgtaaacaacgctcaatacacgtgtcattttattattagctattgcttcaccgccttagctttctcgtgacctagtcgtcctcgtcttttcttcttcttcttctataaaacaatacccaaagagctcttcttcttcacaattcagatttcaatttctcaaaatcttaaaaactttctctcaattctctctaccgtgatcaaggtaaatttctgtgttccttattctctcaaaatcttcgattttgttttcgttcgatcccaatttcgtatatgttctttggtttagattctgttaatcttagatcgaagacgattttctgggtttgatcgttagatatcatcttaattctcgattagggtttcatagatatcatccgatttgttcaaataatttgagttttgtcgaataattactcttcgatttgtgatttctatctagatctggtgttagtttctagtttgtgcgatcgaatttgtcgattaatctgagtttttctgattaacaggtcgactttaacttagcctagcgaagttcctattccgaagttcctattctctagaaagtataggaacttcagatccaccgggatccccgatcatgcaaaaactcattaactcagtgcaaaactatgcctggggcagcaaaacggcgttgactgaactttatggtatggaaaatccgtccagccagccgatggccgagctgtggatgggcgcacatccgaaaagcagttcacgagtgcagaatgccgccggagatatcgtttcactgcgtgatgtgattgagagtgataaatcgactctgctcggagaggccgttgccaaacgctttggcgaactgcctttcctgttcaaagtattatgcgcagcacagccactctccattcaggttcatccaaacaaacacaattctgaaatcggttttgccaaagaaaatgccgcaggtatcccgatggatgccgccgagcgtaactataaagatcctaaccacaagccggagctggtttttgcgctgacgcctttccttgcgatgaacgcgtttcgtgaattttccgagattgtctccctactccagccggtcgcaggtgcacatccggcgattgctcactttttacaacagcctgatgccgaacgtttaagcgaactgttcgccagcctgttgaatatgcagggtgaagaaaaatcccgcgcgctggcgattttaaaatcggccctcgatagccagcagggtgaaccgtggcaaacgattcgtttaatttctgaattttacccggaagacagcggtctgttctccccgctattgctgaatgtggtgaaattgaaccctggcgaagcgatgttcctgttcgctgaaacaccgcacgcttacctgcaaggcgtggcgctggaagtgatggcaaactccgataacgtgctgcgtgcgggtctgacgcctaaatacattgatattccggaactggttgccaatgtgaaattcgaagccaaaccggctaaccagttgttgacccagccggtgaaacaaggtgcagaactggacttcccgattccagtggatgattttgccttctcgctgcatgaccttagtgataaagaaaccaccattagccagcagagtgccgccattttgttctgcgtcgaaggcgatgcaacgttgtggaaaggttctcagcagttacagcttaaaccgggtgaatcagcgtttattgccgccaacgaatcaccggtgactgtcaaaggccacggccgtttagcgcgtgtttacaacaagctgtaaaaacttatctctgttatgaatcagaagaagttcatgtctcgtttcatttaaaactttggtggtttgtgttttggggccttgtaaagcccctgatgaataattgttcaactatgtttccgttcctgtgttatacctttctttctaatgagtaatgacatcaaacttcttctgtattgaaattatgtccttgtgagtctctttatcatcgtttcgtctttacattatatgtgctacttttgtctaatgagcctgaaaagtggctccaatggtacgcactggaagatttgttggcttctggtagatatagcgacagtgttgagcttgtaatatcatgtctcttattgctaaattagttcctttcttaacagaaaccttcaaagtttttgtttttgttttcatttacctaatgtacacatacgctggccatgactaacaacatgtccaggcttagagcatatttttttctagcttaaattgttaacttgtcattcagtaaaatccgagaattgtgaagctctaattgaagctaattcgttttataaagtcagttaaaaagtatactaaattatccaacttttcttcaaaatctcaaaattctatgacaaaacgatagtctttgtttatgtcagtaccacaaagaggtggaaaaaaacaccaaaaaaacaataagcaaactatacactgagaagaaaaataaaagagagctcaatagatgttttatactaacggtagattagatcaaagatccaagctttactctacatagagcagaacccagaatcccttcatatctcttttattctagcaccgataatctactgaaaagaagacacttagagctctgtctctttgtcaaagaagtcccagccgtcatccagaagctccttacgttcattaacagagaagttcctattccgaagttcctattcttcaaaaagtataggaacttctgattccgatgacttcgtaggttcctagctcaagccgctcgtgtccaagcgtcacttacgattagctaatgattacggagcttttgttcccagctttcaggaattgatgccatgcaaggaccatatctagattttggaaagcaccatttagattttacagctaaaagaaatttcgccaagttgatcagtgacaaaacaatccagtcttatattcccttttgctgacaacttaactctgaatgaattaaaatcttataacaagaagttgctactaattgatttatataaaaataagaacatcagttatatatttttttatcagtagaacagcagttatatatatttttgaaaaaataaaataaaatatttacgataactaatataattcattgctctaaatactaaagtatataataaatggttctttttctgtcttttgtgatattaagggttttttttttgtaaaaatatgataattattgtattctataatataagtaaacaatgaacacaac

SEQ ID NO: 156 - DNA, 4674 bp, synthetic construct
  misc_feature 1..4674: note = Guide sequence or cassette for donor insertion
  source 1..4674: mol_type = other DNA
gagaaaattttctctaattttattttcctcattagtaatttatactccataaaacatgagatggggtgtgtaacagcgctagtgtgtcatttggctagcaaagcaaccaatttgaaacatgtaactttatgtgagtttccgttcttggtcattctcagagattaattcttatgttccattaattatttcaatttggtcaaaataaaagctactgagatttcttaaatatagatatagcaacataaacgggcagaagaaggaaaaagaaagaaagaacgattttatttcctttccaaatgcataaacaattgcttcatcaaaggttataaaaccaaacccttgaatatttcgatcagcttcatatcacagtaaaaaaatgaaccaggaataatctagcaaataattaggtcagcagcaaaatgcatgacagttccaaaccacgatcacccttaccagtgtgattcgagctagttaccctatgaggtgacatgaagcgctcacggttactatgacggttagcttcacgactgttggtggcagtagcgtacgacttagctatagttccggacttaccataacttcgtatagcatacattatacgaagttatatcaggatattcttgtttaagatgttgaactctatggaggtttgtatgaactgatgatctaggaccggataagttcccttcttcatagcgaacttattcaaagaatgttttgtgtatcattcttgttacattgttattaatgaaaaaatattattggtcattggactgaacacgagtgttaaatatggaccaggccccaaataagatccattgatatatgaattaaataacaagaataaatcgagtcaccaaaccacttgccttttttaacgagacttgttcaccaacttgatacaaaagtcattatcctatgcaaatcaataatcatacaaaaatatccaataacactaaaaaattaaaagaaatggataatttcacaatatgttatacgataaagaagttacttttccaagaaattcactgattttataagcccacttgcattagataaatggcaaaaaaaaacaaaaaggaaaagaaataaagcacgaagaattctagaaaatacgaaatacgcttcaatgcagtgggacccacggttcaattattgccaattttcagctccaccgtatatttaaaaaataaaacgataatgctaaaaaaatataaatcgtaacgatcgttaaatctcaacggctggatcttatgacgaccgttagaaattgtggttgtcgacgagtcagtaataaacggcgtcaaagtggttgcagccggcacacacgagtcgtgtttatcaactcaaagcacaaatacttttcctcaacctaaaaataaggcaattagccaaaaacaactttgcgtgtaaacaacgctcaatacacgtgtcattttattattagctattgcttcaccgccttagctttctcgtgacctagtcgtcctcgtcttttcttcttcttcttctataaaacaatacccaaagagctcttcttcttcacaattcagatttcaatttctcaaaatcttaaaaactttctctcaattctctctaccgtgatcaaggtaaatttctgtgttccttattctctcaaaatcttcgattttgttttcgttcgatcccaatttcgtatatgttctttggtttagattctgttaatcttagatcgaagacgattttctgggtttgatcgttagatatcatcttaattctcgattagggtttcatagatatcatccgatttgttcaaataatttgagttttgtcgaataattactcttcgatttgtgatttctatctagatctggtgttagtttctagtttgtgcgatcgaatttgtcgattaatctgagtttttctgattaacaggtcgactttaacttagcctagcgaagttcctattccgaagttcctattctctagaaagtataggaacttcagatccaccgggatccccgatcatgcagaagctcatcaactctgtgcagaactacgcctggggctctaagaccgccttgaccgagttgtacgggatggagaacccttcctcacagcctatggccgagttgtggatgggtgctcaccctaagtcctcctccagagtgcagaacgctgctggagacattgtctccctcagagacgtgatcgagtccgacaagtccaccctgctgggagaggccgtcgctaagagattcggtgagttgcccttcttgttcaaggtcctctgcgctgctcagcccttgtctatccaagtgcaccctaacaagcacaactccgagatcggattcgccaaggagaacgctgctggcatccctatggacgcagctgagcgtaactacaaagaccctaaccacaagcccgagttggtgttcgctctcacccctttcttggccatgaacgctttccgcgagttctctgagattgtgtcactcctccagcccgttgctggtgctcaccctgctatcgctcacttcttgcagcagcctgacgctgagaggctctcagagctgttcgcttccctcctcaacatgcaaggcgaagagaagtccagagccctcgccatcctgaagtctgccctcgactctcagcagggagagccctggcagactattcgcctgatttccgagttctacccagaggactccgggttgttctctcccttgttgctcaacgtggtgaagctgaacccaggcgaggccatgttcttgttcgccgagactcctcacgcctacctccaaggagtggccctggaggtcatggccaactctgacaacgtccttagagctggccttactcctaaatacatcgacattcccgagctggtggccaacgtgaagttcgaggccaagcctgctaaccagttgctcacccagcccgttaagcagggagctgaactcgacttccctatccctgttgacgacttcgccttctccttgcacgacctctctgacaaggagactaccatatcccagcagtccgctgctatcctgttctgcgtggagggagacgctaccctgtggaaaggatctcagcagcttcagctgaagcctggagagtcagctttcattgctgccaacgagtcacctgtgactgtgaagggccacgggaggctcgccagagtctacaacaagttgtagaaacttatctctgttatgaatcagaagaagttcatgtctcgtttcatttaaaactttggtggtttgtgttttggggccttgtaaagcccctgatgaataattgttcaactatgtttccgttcctgtgttatacctttctttctaatgagtaatgacatcaaacttcttctgtattgaaattatgtccttgtgagtctctttatcatcgtttcgtctttacattatatgtgctacttttgtctaatgagcctgaaaagtggctccaatggtacgcactggaagatttgttggcttctggtagatatagcgacagtgttgagcttgtaatatcatgtctcttattgctaaattagttcctttcttaacagaaaccttcaaagtttttgtttttgttttcatttacctaatgtacacatacgctggccatgactaacaacatgtccaggcttagagcatatttttttctagcttaaattgttaacttgtcattcagtaaaatccgagaattgtgaagctctaattgaagctaattcgttttataaagtcagttaaaaagtatactaaattatccaacttttcttcaaaatctcaaaattctatgacaaaacgatagtctttgtttatgtcagtaccacaaagaggtggaaaaaaacaccaaaaaaacaataagcaaactatacactgagaagaaaaataaaagagagctcaatagatgttttatactaacggtagattagatcaaagatccaagctttactctacatagagcagaacccagaatcccttcatatctcttttattctagcaccgataatctactgaaaagaagacacttagagctctgtctctttgtcaaagaagtcccagccgtcatccagaagctccttacgttcattaacagatcccagccgtcatccagaagctccttacgttcattaacagagaagttcctattccgaagttcctattcttcaaaaagtataggaacttctgattccgatgacttcgtaggttcctagctcaagccgctcgtgtccaagcgtcacttacgattagctaatgattacggcatctaggaccgactagtccaggagttcccgcggccaaacacttcaatatatacggaaaaatagaaaatgagtccgtcgtgaaatgttcaagaaattaactctatggaacacctagagtagatcgatgcttacatttctgattctttacttggttattgttggcacattggtatattatgcatgacaacgaaaggttcacgtgtcaattaaatatactatacatatatgacgacttcaattagttatttgctgctctgactgtgttttataagaaaaatataatattattacatagtgaacatggactaaaaggtgggctatggtggataatgaagatgacaagaccagtaccaaagtcaaacagattttgctttttctttacttctaaatttaataggataatatatagacgcatgcacatc

SEQ ID NO: 157 - DNA, 4666 bp, synthetic construct
  misc_feature 1..4666: note = Guide sequence or cassette for donor insertion
  source 1..4666: mol_type = other DNA
attagttgactttgtatgcatgtacctcaaactcaaatagatacctattatcctttgttagttataatctcttttcattaatttgagagggatcttattagtgaaagcaaaacaatgtctgttatacaatagtacacatataaaacttcttatttaataataaaaaaaacgtaatggaaattatgtcaaaaaaatatattattaacattattaatttataaggtgaaatattccaattcaagcacacgagcaacagggtgccgcgccattcgggtcaaattgctttcgctcattattgtattgtagaatagaaaacgttaataaattatgaagccaatcgatgaagacattttctgtttttctctttcttaccattttcttctaaggtcatatgtatcacatacccacgcatagcactacataacaccgacgtcgagctagttaccctatgaggtgacatgaagcgctcacggttactatgacggttagcttcacgactgttggtggcagtagcgtacgacttagctatagttccggacttaccataacttcgtatagcatacattatacgaagttatatcaggatattcttgtttaagatgttgaactctatggaggtttgtatgaactgatgatctaggaccggataagttcccttcttcatagcgaacttattcaaagaatgttttgtgtatcattcttgttacattgttattaatgaaaaaatattattggtcattggactgaacacgagtgttaaatatggaccaggccccaaataagatccattgatatatgaattaaataacaagaataaatcgagtcaccaaaccacttgccttttttaacgagacttgttcaccaacttgatacaaaagtcattatcctatgcaaatcaataatcatacaaaaatatccaataacactaaaaaattaaaagaaatggataatttcacaatatgttatacgataaagaagttacttttccaagaaattcactgattttataagcccacttgcattagataaatggcaaaaaaaaacaaaaaggaaaagaaataaagcacgaagaattctagaaaatacgaaatacgcttcaatgcagtgggacccacggttcaattattgccaattttcagctccaccgtatatttaaaaaataaaacgataatgctaaaaaaatataaatcgtaacgatcgttaaatctcaacggctggatcttatgacgaccgttagaaattgtggttgtcgacgagtcagtaataaacggcgtcaaagtggttgcagccggcacacacgagtcgtgtttatcaactcaaagcacaaatacttttcctcaacctaaaaataaggcaattagccaaaaacaactttgcgtgtaaacaacgctcaatacacgtgtcattttattattagctattgcttcaccgccttagctttctcgtgacctagtcgtcctcgtcttttcttcttcttcttctataaaacaatacccaaagagctcttcttcttcacaattcagatttcaatttctcaaaatcttaaaaactttctctcaattctctctaccgtgatcaaggtaaatttctgtgttccttattctctcaaaatcttcgattttgttttcgttcgatcccaatttcgtatatgttctttggtttagattctgttaatcttagatcgaagacgattttctgggtttgatcgttagatatcatcttaattctcgattagggtttcatagatatcatccgatttgttcaaataatttgagttttgtcgaataattactcttcgatttgtgatttctatctagatctggtgttagtttctagtttgtgcgatcgaatttgtcgattaatctgagtttttctgattaacaggtcgactttaacttagcctagcgaagttcctattccgaagttcctattctctagaaagtataggaacttcagatccaccgggatccccgatcatgcagaagctcatcaactctgtgcagaactacgcctggggctctaagaccgccttgaccgagttgtacgggatggagaacccttcctcacagcctatggccgagttgtggatgggtgctcaccctaagtcctcctccagagtgcagaacgctgctggagacattgtctccctcagagacgtgatcgagtccgacaagtccaccctgctgggagaggccgtcgctaagagattcggtgagttgcccttcttgttcaaggtcctctgcgctgctcagcccttgtctatccaagtgcaccctaacaagcacaactccgagatcggattcgccaaggagaacgctgctggcatccctatggacgcagctgagcgtaactacaaagaccctaaccacaagcccgagttggtgttcgctctcacccctttcttggccatgaacgctttccgcgagttctctgagattgtgtcactcctccagcccgttgctggtgctcaccctgctatcgctcacttcttgcagcagcctgacgctgagaggctctcagagctgttcgcttccctcctcaacatgcaaggcgaagagaagtccagagccctcgccatcctgaagtctgccctcgactctcagcagggagagccctggcagactattcgcctgatttccgagttctacccagaggactccgggttgttctctcccttgttgctcaacgtggtgaagctgaacccaggcgaggccatgttcttgttcgccgagactcctcacgcctacctccaaggagtggccctggaggtcatggccaactctgacaacgtccttagagctggccttactcctaaatacatcgacattcccgagctggtggccaacgtgaagttcgaggccaagcctgctaaccagttgctcacccagcccgttaagcagggagctgaactcgacttccctatccctgttgacgacttcgccttctccttgcacgacctctctgacaaggagactaccatatcccagcagtccgctgctatcctgttctgcgtggagggagacgctaccctgtggaaaggatctcagcagcttcagctgaagcctggagagtcagctttcattgctgccaacgagtcacctgtgactgtgaagggccacgggaggctcgccagagtctacaacaagttgtagaaacttatctctgttatgaatcagaagaagttcatgtctcgtttcatttaaaactttggtggtttgtgttttggggccttgtaaagcccctgatgaataattgttcaactatgtttccgttcctgtgttatacctttctttctaatgagtaatgacatcaaacttcttctgtattgaaattatgtccttgtgagtctctttatcatcgtttcgtctttacattatatgtgctacttttgtctaatgagcctgaaaagtggctccaatggtacgcactggaagatttgttggcttctggtagatatagcgacagtgttgagcttgtaatatcatgtctcttattgctaaattagttcctttcttaacagaaaccttcaaagtttttgtttttgttttcatttacctaatgtacacatacgctggccatgactaacaacatgtccaggcttagagcatatttttttctagcttaaattgttaacttgtcattcagtaaaatccgagaattgtgaagctctaattgaagctaattcgttttataaagtcagttaaaaagtatactaaattatccaacttttcttcaaaatctcaaaattctatgacaaaacgatagtctttgtttatgtcagtaccacaaagaggtggaaaaaaacaccaaaaaaacaataagcaaactatacactgagaagaaaaataaaagagagctcaatagatgttttatactaacggtagattagatcaaagatccaagctttactctacatagagcagaacccagaatcccttcatatctcttttattctagcaccgataatctactgaaaagaagacacttagagctctgtctctttgtcaaagaagtcccagccgtcatccagaagctccttacgttcattaacagatcccagccgtcatccagaagctccttacgttcattaacagagaagttcctattccgaagttcctattcttcaaaaagtataggaacttctgattccgatgacttcgtaggttcctagctcaagccgctcgtgtccaagcgtcacttacgattagctaatgattacggcatctaggaccgactaggcagggtttaccataccccaacccatgtcacaagtcatcacacagtcttagttttttttttttaaaataaaaaaatgttaattattaatttttgttagtgaaagatttgaattcatagattatctttctttatttcattttttatcactaaattaaccttatagttatatttccaagtctaagtcattttatttttaatttttgagaaaactttttttctattttagaacttaatctatttaatgtcaatttgctcagcagttcatatggaagaattttggaagacaggttgattttttaggatatatttcagttttaatttacatgaattttagtatattatatttttttattagcatattattatacaaaataatcatttattttatccataactaatttacatatgagaatttagttagttatga

SEQ ID NO: 158 - DNA, 4630 bp, synthetic construct
  misc_feature 1..4630: note = Guide sequence or cassette for donor insertion
  source 1..4630: mol_type = other DNA
gattagataggttcccggattaggcataacccacttacactcttgaaaattagtttgattggtgcacttcaataaaaaaattctataaaattttattaaaaaatagaaaaagaaaaataaatttttctttaatttttttaaaaaattagaaaaaagataaactacaactacttgtattgcgctaagtttgttaaaggaataaaactatttctcaaagccttcactttgatgtatagagattttactgaatttacataattttgctatttactttctaaacttgttgattcaacattttaattctggatatttttgccgtcaaaactaggccagcaaatataggggtgagcataaatcagagaaaaccgagcaattcgacccaaaaataagtgtttcgggtgggtatatgcgggtcgagctagttaccctatgaggtgacatgaagcgctcacggttactatgacggttagcttcacgactgttggtggcagtagcgtacgacttagctatagttccggacttaccataacttcgtatagcatacattatacgaagttatatcaggatattcttgtttaagatgttgaactctatggaggtttgtatgaactgatgatctaggaccggataagttcccttcttcatagcgaacttattcaaagaatgttttgtgtatcattcttgttacattgttattaatgaaaaaatattattggtcattggactgaacacgagtgttaaatatggaccaggccccaaataagatccattgatatatgaattaaataacaagaataaatcgagtcaccaaaccacttgccttttttaacgagacttgttcaccaacttgatacaaaagtcattatcctatgcaaatcaataatcatacaaaaatatccaataacactaaaaaattaaaagaaatggataatttcacaatatgttatacgataaagaagttacttttccaagaaattcactgattttataagcccacttgcattagataaatggcaaaaaaaaacaaaaaggaaaagaaataaagcacgaagaattctagaaaatacgaaatacgcttcaatgcagtgggacccacggttcaattattgccaattttcagctccaccgtatatttaaaaaataaaacgataatgctaaaaaaatataaatcgtaacgatcgttaaatctcaacggctggatcttatgacgaccgttagaaattgtggttgtcgacgagtcagtaataaacggcgtcaaagtggttgcagccggcacacacgagtcgtgtttatcaactcaaagcacaaatacttttcctcaacctaaaaataaggcaattagccaaaaacaactttgcgtgtaaacaacgctcaatacacgtgtcattttattattagctattgcttcaccgccttagctttctcgtgacctagtcgtcctcgtcttttcttcttcttcttctataaaacaatacccaaagagctcttcttcttcacaattcagatttcaatttctcaaaatcttaaaaactttctctcaattctctctaccgtgatcaaggtaaatttctgtgttccttattctctcaaaatcttcgattttgttttcgttcgatcccaatttcgtatatgttctttggtttagattctgttaatcttagatcgaagacgattttctgggtttgatcgttagatatcatcttaattctcgattagggtttcatagatatcatccgatttgttcaaataatttgagttttgtcgaataattactcttcgatttgtgatttctatctagatctggtgttagtttctagtttgtgcgatcgaatttgtcgattaatctgagtttttctgattaacaggtcgactttaacttagcctagcgaagttcctattccgaagttcctattctctagaaagtataggaacttcagatccaccgggatccccgatcatgcagaagctcatcaactctgtgcagaactacgcctggggctctaagaccgccttgaccgagttgtacgggatggagaacccttcctcacagcctatggccgagttgtggatgggtgctcaccctaagtcctcctccagagtgcagaacgctgctggagacattgtctccctcagagacgtgatcgagtccgacaagtccaccctgctgggagaggccgtcgctaagagattcggtgagttgcccttcttgttcaaggtcctctgcgctgctcagcccttgtctatccaagtgcaccctaacaagcacaactccgagatcggattcgccaaggagaacgctgctggcatccctatggacgcagctgagcgtaactacaaagaccctaaccacaagcccgagttggtgttcgctctcacccctttcttggccatgaacgctttccgcgagttctctgagattgtgtcactcctccagcccgttgctggtgctcaccctgctatcgctcacttcttgcagcagcctgacgctgagaggctctcagagctgttcgcttccctcctcaacatgcaaggcgaagagaagtccagagccctcgccatcctgaagtctgccctcgactctcagcagggagagccctggcagactattcgcctgatttccgagttctacccagaggactccgggttgttctctcccttgttgctcaacgtggtgaagctgaacccaggcgaggccatgttcttgttcgccgagactcctcacgcctacctccaaggagtggccctggaggtcatggccaactctgacaacgtccttagagctggccttactcctaaatacatcgacattcccgagctggtggccaacgtgaagttcgaggccaagcctgctaaccagttgctcacccagcccgttaagcagggagctgaactcgacttccctatccctgttgacgacttcgccttctccttgcacgacctctctgacaaggagactaccatatcccagcagtccgctgctatcctgttctgcgtggagggagacgctaccctgtggaaaggatctcagcagcttcagctgaagcctggagagtcagctttcattgctgccaacgagtcacctgtgactgtgaagggccacgggaggctcgccagagtctacaacaagttgtagaaacttatctctgttatgaatcagaagaagttcatgtctcgtttcatttaaaactttggtggtttgtgttttggggccttgtaaagcccctgatgaataattgttcaactatgtttccgttcctgtgttatacctttctttctaatgagtaatgacatcaaacttcttctgtattgaaattatgtccttgtgagtctctttatcatcgtttcgtctttacattatatgtgctacttttgtctaatgagcctgaaaagtggctccaatggtacgcactggaagatttgttggcttctggtagatatagcgacagtgttgagcttgtaatatcatgtctcttattgctaaattagttcctttcttaacagaaaccttcaaagtttttgtttttgttttcatttacctaatgtacacatacgctggccatgactaacaacatgtccaggcttagagcatatttttttctagcttaaattgttaacttgtcattcagtaaaatccgagaattgtgaagctctaattgaagctaattcgttttataaagtcagttaaaaagtatactaaattatccaacttttcttcaaaatctcaaaattctatgacaaaacgatagtctttgtttatgtcagtaccacaaagaggtggaaaaaaacaccaaaaaaacaataagcaaactatacactgagaagaaaaataaaagagagctcaatagatgttttatactaacggtagattagatcaaagatccaagctttactctacatagagcagaacccagaatcccttcatatctcttttattctagcaccgataatctactgaaaagaagacacttagagctctgtctctttgtcaaagaagtcccagccgtcatccagaagctccttacgttcattaacagatcccagccgtcatccagaagctccttacgttcattaacagagaagttcctattccgaagttcctattcttcaaaaagtataggaacttctgattccgatgacttcgtaggttcctagctcaagccgctcgtgtccaagcgtcacttacgattagctaatgattacggcatctaggaccgactagtatcgggttaaatagtgtgaaaatggtaatatgtgggttatttcgggcgggtgcgggttataaaaacaaaaaccaacgtaccttgcatcacccacaccttcgcgcaccaaggttcaagaatgcaccaaggctcaatggaaatagataccccaaataacccacccgctacgaaccgaacccgcctttatccgaacgttcatcgaacggtggtgggctgcgtttttcattggtccgttttgatgaggcccatatgttggtagcttgggccacggcttatttaaatgatgggccaacatacttttactcatcgaatcctcaaatcattatgatttatgactttgtctggcttctagatgaggaaatacaggaggattatagaagctctttgtgatattttggttttaggatgat

SEQ ID NO: 159 - DNA, 4658 bp, synthetic construct
  misc_feature 1..4658: note = Guide sequence or cassette for donor insertion
  source 1..4658: mol_type = other DNA
gatattgttaatctttccttccctcttttatactataagaacccaaggaaagaataaaattgggatattttctttcccttccctcgtagatcggccattccacaaaccaaaaatgtgtaagtgtccctgcccttataataatatatttagaattttagaactcgttataaatatttgcaaaaacaaatttctttgaataaaggtaataggagaacgttaaggtaaaggatgataacaattattcagatggggaaatcgaactgttcaaagttcagatccttttaaccaattttcacaacccacgttatggtacgaacatcactaaagggtcacgtttgccaccttcactcatttttttgctttcggcctgaatggtcaatatcaaagctaacaaaattaaaacattatttatttcagcaacaggcaacttctgttctggatacaatgtaccagcttcgagctagttaccctatgaggtgacatgaagcgctcacggttactatgacggttagcttcacgactgttggtggcagtagcgtacgacttagctatagttccggacttaccataacttcgtatagcatacattatacgaagttatatcaggatattcttgtttaagatgttgaactctatggaggtttgtatgaactgatgatctaggaccggataagttcccttcttcatagcgaacttattcaaagaatgttttgtgtatcattcttgttacattgttattaatgaaaaaatattattggtcattggactgaacacgagtgttaaatatggaccaggccccaaataagatccattgatatatgaattaaataacaagaataaatcgagtcaccaaaccacttgccttttttaacgagacttgttcaccaacttgatacaaaagtcattatcctatgcaaatcaataatcatacaaaaatatccaataacactaaaaaattaaaagaaatggataatttcacaatatgttatacgataaagaagttacttttccaagaaattcactgattttataagcccacttgcattagataaatggcaaaaaaaaacaaaaaggaaaagaaataaagcacgaagaattctagaaaatacgaaatacgcttcaatgcagtgggacccacggttcaattattgccaattttcagctccaccgtatatttaaaaaataaaacgataatgctaaaaaaatataaatcgtaacgatcgttaaatctcaacggctggatcttatgacgaccgttagaaattgtggttgtcgacgagtcagtaataaacggcgtcaaagtggttgcagccggcacacacgagtcgtgtttatcaactcaaagcacaaatacttttcctcaacctaaaaataaggcaattagccaaaaacaactttgcgtgtaaacaacgctcaatacacgtgtcattttattattagctattgcttcaccgccttagctttctcgtgacctagtcgtcctcgtcttttcttcttcttcttctataaaacaatacccaaagagctcttcttcttcacaattcagatttcaatttctcaaaatcttaaaaactttctctcaattctctctaccgtgatcaaggtaaatttctgtgttccttattctctcaaaatcttcgattttgttttcgttcgatcccaatttcgtatatgttctttggtttagattctgttaatcttagatcgaagacgattttctgggtttgatcgttagatatcatcttaattctcgattagggtttcatagatatcatccgatttgttcaaataatttgagttttgtcgaataattactcttcgatttgtgatttctatctagatctggtgttagtttctagtttgtgcgatcgaatttgtcgattaatctgagtttttctgattaacaggtcgactttaacttagcctagcgaagttcctattccgaagttcctattctctagaaagtataggaacttcagatccaccgggatccccgatcatgcagaagctcatcaactctgtgcagaactacgcctggggctctaagaccgccttgaccgagttgtacgggatggagaacccttcctcacagcctatggccgagttgtggatgggtgctcaccctaagtcctcctccagagtgcagaacgctgctggagacattgtctccctcagagacgtgatcgagtccgacaagtccaccctgctgggagaggccgtcgctaagagattcggtgagttgcccttcttgttcaaggtcctctgcgctgctcagcccttgtctatccaagtgcaccctaacaagcacaactccgagatcggattcgccaaggagaacgctgctggcatccctatggacgcagctgagcgtaactacaaagaccctaaccacaagcccgagttggtgttcgctctcacccctttcttggccatgaacgctttccgcgagttctctgagattgtgtcactcctccagcccgttgctggtgctcaccctgctatcgctcacttcttgcagcagcctgacgctgagaggctctcagagctgttcgcttccctcctcaacatgcaaggcgaagagaagtccagagccctcgccatcctgaagtctgccctcgactctcagcagggagagccctggcagactattcgcctgatttccgagttctacccagaggactccgggttgttctctcccttgttgctcaacgtggtgaagctgaacccaggcgaggccatgttcttgttcgccgagactcctcacgcctacctccaaggagtggccctggaggtcatggccaactctgacaacgtccttagagctggccttactcctaaatacatcgacattcccgagctggtggccaacgtgaagttcgaggccaagcctgctaaccagttgctcacccagcccgttaagcagggagctgaactcgacttccctatccctgttgacgacttcgccttctccttgcacgacctctctgacaaggagactaccatatcccagcagtccgctgctatcctgttctgcgtggagggagacgctaccctgtggaaaggatctcagcagcttcagctgaagcctggagagtcagctttcattgctgccaacgagtcacctgtgactgtgaagggccacgggaggctcgccagagtctacaacaagttgtagaaacttatctctgttatgaatcagaagaagttcatgtctcgtttcatttaaaactttggtggtttgtgttttggggccttgtaaagcccctgatgaataattgttcaactatgtttccgttcctgtgttatacctttctttctaatgagtaatgacatcaaacttcttctgtattgaaattatgtccttgtgagtctctttatcatcgtttcgtctttacattatatgtgctacttttgtctaatgagcctgaaaagtggctccaatggtacgcactggaagatttgttggcttctggtagatatagcgacagtgttgagcttgtaatatcatgtctcttattgctaaattagttcctttcttaacagaaaccttcaaagtttttgtttttgttttcatttacctaatgtacacatacgctggccatgactaacaacatgtccaggcttagagcatatttttttctagcttaaattgttaacttgtcattcagtaaaatccgagaattgtgaagctctaattgaagctaattcgttttataaagtcagttaaaaagtatactaaattatccaacttttcttcaaaatctcaaaattctatgacaaaacgatagtctttgtttatgtcagtaccacaaagaggtggaaaaaaacaccaaaaaaacaataagcaaactatacactgagaagaaaaataaaagagagctcaatagatgttttatactaacggtagattagatcaaagatccaagctttactctacatagagcagaacccagaatcccttcatatctcttttattctagcaccgataatctactgaaaagaagacacttagagctctgtctctttgtcaaagaagtcccagccgtcatccagaagctccttacgttcattaacagatcccagccgtcatccagaagctccttacgttcattaacagagaagttcctattccgaagttcctattcttcaaaaagtataggaacttctgattccgatgacttcgtaggttcctagctcaagccgctcgtgtccaagcgtcacttacgattagctaatgattacggcatctaggaccgactaggtcggctgtctgtgtgtaaattatggtgaccagccagcgacaacgcaacattaaaaacttgggaaaaagaacgtgcttgtctatgactctgtaaaaaaaatacattgggagaacaaggatttggtttctatgttgttactttgtttttttttttaagtcatataatttttaatattaaatgtcatcattaaatattatgtattattattttaatgggccaacataaaaataatatggaaagtgatagtagagaaactaaaaaaatctgaaaaagacagatagaagagcttaattaatgtgttttgggttagcatttgtaaatttaatcttgaattaacttgattttgtaaaattcatttaagataaaaataaaattcaacaaaattgatttgagaag

SEQ ID NO: 160 - DNA, 21 bp, Glycine max
  source 1..21: mol_type = genomic DNA
ggacctattgggctaggttgg

SEQ ID NO: 161 - DNA, 22 bp, Glycine max
  source 1..22: mol_type = genomic DNA
gggtgtaaatcaggttgtctcg

SEQ ID NO: 162 - DNA, 22 bp, Glycine max
  source 1..22: mol_type = genomic DNA
gggaggaggcatattgtctacg

SEQ ID NO: 163 - DNA, 22 bp, Glycine max
  source 1..22: mol_type = genomic DNA
aacttgtcaaccacgtgaaagg

SEQ ID NO: 164 - DNA, 26 bp, Glycine max
  source 1..26: mol_type = genomic DNA
tcttcaagagttgacacacatagacc

SEQ ID NO: 165 - DNA, 19 bp, Glycine max
  source 1..19: mol_type = genomic DNA
aaaacatgctgggccttgg

SEQ ID NO: 166 - DNA, 22 bp, Glycine max
  source 1..22: mol_type = genomic DNA
ggcctgctgtctgaataaatgg

SEQ ID NO: 167 - DNA, 26 bp, Glycine max
  source 1..26: mol_type = genomic DNA
ttaattgggtatgaattaccagttcc

SEQ ID NO: 168 - DNA, 25 bp, Glycine max
  source 1..25: mol_type = genomic DNA
cttaacaaacccaatgactttttcc

SEQ ID NO: 169 - DNA, 21 bp, Glycine max
  source 1..21: mol_type = genomic DNA
tgctccacagttgaagattgc

SEQ ID NO: 170 - DNA, 24 bp, Glycine max
  source 1..24: mol_type = genomic DNA
ggttgaataagttgaaattttagg

SEQ ID NO: 171 - DNA, 20 bp, Glycine max
  source 1..20: mol_type = genomic DNA
gtctttttgggtgagactgc

SEQ ID NO: 172 - DNA, 20 bp, Glycine max
  source 1..20: mol_type = genomic DNA
cacatggaggtccgttcacc

SEQ ID NO: 173 - DNA, 24 bp, Glycine max
  source 1..24: mol_type = genomic DNA
catcatatggcaaactgaagtagc

SEQ ID NO: 174 - DNA, 26 bp, Glycine max
  source 1..26: mol_type = genomic DNA
tattaccaagaagaaaagagactagg

SEQ ID NO: 175 - DNA, 21 bp, Glycine max
  source 1..21: mol_type = genomic DNA
aatccaatacccaaccaaagg

SEQ ID NO: 176 - DNA, 21 bp, Glycine max
  source 1..21: mol_type = genomic DNA
cacattgtgtgcgactagagc

SEQ ID NO: 177 - DNA, 25 bp, Glycine max
  source 1..25: mol_type = genomic DNA
ctaatccatgattgtacttgaatcc

SEQ ID NO: 178 - DNA, 26 bp, Glycine max
  source 1..26: mol_type = genomic DNA
gtttagaaaaaccatcttttacttcg

SEQ ID NO: 179 - DNA, 24 bp, Glycine max
  source 1..24: mol_type = genomic DNA
aaaaataccctgcaataaaactcg

SEQ ID NO: 180 - DNA, 21 bp, Glycine max
  source 1..21: mol_type = genomic DNA
gcaaacgcagtttgttctttg

SEQ ID NO: 181 - DNA, 21 bp, Glycine max
  source 1..21: mol_type = genomic DNA
tcttgttcgcccgaatgatag

SEQ ID NO: 182 - DNA, 25 bp, Glycine max
  source 1..25: mol_type = genomic DNA
catgtggcaaatatgtattggtttg

SEQ ID NO: 183 - DNA, 26 bp, Glycine max
  source 1..26: mol_type = genomic DNA
ctgtttcttctttccatcatttttcc

SEQ ID NO: 184 - DNA, 22 bp, Glycine max
  source 1..22: mol_type = genomic DNA
tattgaatgcaggggctttttg

SEQ ID NO: 185 - DNA, 22 bp, Glycine max
  source 1..22: mol_type = genomic DNA
cgcagaatctagcggtgtagtg

SEQ ID NO: 186 - DNA, 23 bp, Glycine max
  source 1..23: mol_type = genomic DNA
aaaaagtgagtgtttgggtgagg

SEQ ID NO: 187 - DNA, 23 bp, Glycine max
  source 1..23: mol_type = genomic DNA
aatctttgacacaagagggaacc

SEQ ID NO: 188 - DNA, 26 bp, Glycine max
  source 1..26: mol_type = genomic DNA
ccactcacataaataaatcctcacag

SEQ ID NO: 189 - DNA, 26 bp, Glycine max
  source 1..26: mol_type = genomic DNA
ttttactatgtaataaccgcattgag

SEQ ID NO: 190 - DNA, 26 bp, Glycine max
  source 1..26: mol_type = genomic DNA
gaagctatttttaagcttgtccatcc

SEQ ID NO: 191 - DNA, 26 bp, Glycine max
  source 1..26: mol_type = genomic DNA
ggcaactgcaatctatctttattacc

SEQ ID NO: 192 - DNA, 26 bp, Glycine max
  source 1..26: mol_type = genomic DNA
aagtatgagtttccaattcacacagc

SEQ ID NO: 193 - DNA, 20 bp, Glycine max
  source 1..20: mol_type = genomic DNA
gtaagggctgttccgtgtgg

SEQ ID NO: 194 - DNA, 19 bp, Glycine max
  source 1..19: mol_type = genomic DNA
ccgaccttagccatgaagg

SEQ ID NO: 195 - DNA, 24 bp, Glycine max
  source 1..24: mol_type = genomic DNA
tgcttcctagagtcatcaaaatgg

SEQ ID NO: 196 - DNA, 26 bp, Glycine max
  source 1..26: mol_type = genomic DNA
tttcgaatatatagcattttcgtacc

SEQ ID NO: 197 - DNA, 24 bp, Glycine max
  source 1..24: mol_type = genomic DNA
ttgttttgtcactgatcaacttgg

SEQ ID NO: 198 - DNA, 22 bp, Glycine max
  source 1..22: mol_type = genomic DNA
aattaggtcagcagcaaaatgc

SEQ ID NO: 199 - DNA, 24 bp, Glycine max
  source 1..24: mol_type = genomic DNA
gcatcgatctactctaggtgttcc

SEQ ID NO: 200 - DNA, 26 bp, Glycine max
  source 1..26: mol_type = genomic DNA
ctctttcttaccattttcttctaagg

SEQ ID NO: 201 - DNA, 22 bp, Glycine max
  source 1..22: mol_type = genomic DNA
tgtgtgatgacttgtgacatgg

SEQ ID NO: 202 - DNA, 21 bp, Glycine max
  source 1..21: mol_type = genomic DNA
cagagaaaaccgagcaattcg

SEQ ID NO: 203 - DNA, 20 bp, Glycine max
  source 1..20: mol_type = genomic DNA
tgtgggtgatgcaaggtacg

SEQ ID NO: 204 - DNA, 23 bp, Glycine max
  source 1..23: mol_type = genomic DNA
gcctgaatggtcaatatcaaagc

SEQ ID NO: 205 - DNA, 24 bp, Glycine max
  source 1..24: mol_type = genomic DNA
caagtttttaatgttgcgttgtcg

SEQ ID NO: 206 - DNA, 785903 bp, Glycine max
  misc_feature 24994..25356: note = n is a, c, g, or t
  misc_feature 52414..54245: note = n is a, c, g, or t
  misc_feature 116477..117722: note = n is a, c, g, or t
  misc_feature 162471..162570: note = n is a, c, g, or t
  misc_feature 254333..257564: note = n is a, c, g, or t
  misc_feature 259394..259493: note = n is a, c, g, or t
  misc_feature 264760..264859: note = n is a, c, g, or t
  misc_feature 362641..363735: note = n is a, c, g, or t
  misc_feature 397116..397215: note = n is a, c, g, or t
  misc_feature 468544..468643: note = n is a, c, g, or t
  misc_feature 528974..529073: note = n is a, c, g, or t
  misc_feature 532534..532633: note = n is a, c, g, or t
  misc_feature 533711..536241: note = n is a, c, g, or t
  misc_feature 547720..547819: note = n is a, c, g, or t
  misc_feature 607469..607568: note = n is a, c, g, or t
  source 1..785903: mol_type = genomic DNA
chraaacgttagaagttagaactagacacgcaatacacgcattgaaaataactcccaagatcaccgaaagctgacatttttttctcccactgtgtggttactttcacaccattctaggagttgataaatgcaggaaacggttggaagaggggcaaatgggcacagaaattaaaaatagcaaccaattaatgaaagagttcaaatcagtgctaggaaggaaattagaggaaaggtgtgacttttagcaaagaaaaaaatccagaggaaaaaaaggaaaagaatccaagtagtcccaaaaatggaaaaggggtgattctgacaaacaatgactgcgtgagagacctgagccaaaaaacgggtcagatgcaaagtttctgagaaaaactaatgaatgatgtgatgtgacaaacctggattgcacggtgatctttgtggtgggcgaggcagagagagcagagagggccattcatacagtccaagcaatacatgttgcattcgctcttgtgagaatcagcatgcaacttgcattgaacaaagaagctctctttcagcagtggcttcaaccacggtggccacctattgtcctcatcatcaggccctccagcaccctattcaaaaagaccaaacactttaatcagacacaaaagttaaaacaaaaaacaatagaatcccaatgccttcacaccccatcaaaaaatagagcacatacatttaagctcaatgaaagagtctagtatgcttaccatgattctcctgttcttgggcttgatttctctgacagcggtgtcttggttttcaattgccatgttagttgaagagggagggagagagagagtgaagagaaacagagagaagaggtgtatgttttgaagttacagaggattgagaagtggagaagagtgggggcaatgagggagggaatgggttgttcttgtaggacttggaagcggtagatagattggtgttttagagagagaaagatgagtgagatggtttgggtcgttcttatccgcacaaagtcttcaaccgaacctagctccgaacccgaaccaacaaagatgcgttgggcgtaaggaacccacctccttctttcctttttaatcttcattaaatatttaacatttcatttataattgtctcactgatcttatcattttattttattattaacaataataatctctctgctgctattattttgctttcattattcgcgattaaaacattttattcgcctcgggcgtgggctttgccacacttatttcgtcctcttgctttaaactaatgcagcatactttttcatatggtaaaacatttgatatatatatatatttttttagggctgctcaggagcttgtcctaatccaacttgcattggtttattaatatgaaatatctttcaattgtactagctatattaggtcttgtcttgtccctactaaatgtgtatacaagctataagcattggctatatatcactattcacatcgcaattcttcgtttgtcaatgtaaaacgttgataaattaatcaagccctcaactaacataactctgtttggaaagaggatgtttcattaaaatacccattgcacaggtgactaagataagaagttatgtggtgtttgaagcaactctatgtaaaacctaataataaatagtaggagctgaattgtaagcatcaggttggccctaatcatgtgcgttaggtctcggttggccatccttaattagactctataatagtagcatttcgtgagggtcatactacgatttctagaaacactttttgtttcaacaaataaaatttaaaagctttgttccagttttttaggttaagagagtttccttttaattaatgcttttcgttatgcaatgtatatcattcatgaatctttactgagaaaaaaaatactgtcattcatgaaccaaatatatcgtgtttggatatatgtaaaggtacggtttttttttttaaaaaaatatagtaatgtaatgtaaaggtaccttctttgcattgaaaaattaaagaaagacaaattttcataatattttgttgcgttcgataacattttggaattttaaagtcaattttacgataaatgaagagtttttgttgaatataattgactgtgtggagctcacaaaaatttaaatacatatttatatttatacttcacagaaaagtttctatcagcatttaaataattttgtttttttaatttatattaagacattatttataaaaaaatattatttttaattctgtttttaaggcaattttgattctgctaaaatcaattattttaatataatttctatcaaaagtttgagtcatgtacaaccaataaatgttgaatgctacataaacttagtttacatggctaaacagatgaacaatatatcaggagaatggctaattaattccattagtagttgaaaatatagctgcatgcagagaatctaaatcccatgtagactccaaactccagagtagaaacttgcccactatgtccttcagtacttctgcaactcctatcccaagtcgaattgctttaattagtagcaatcattggcttgattatgatggtaattaattaatttgaaaacggtgattcagctagccattgcgcctttggttagtgacagtggtgagtagcagggaagtgtgtgtaatgatgctgcgtgttggtggctaaattttccaagagaaattgtgaggatgaaggtacataagagtttggaatatagcatagggttattatagacaagtgcttctataatactactataaattaaaatggttagatttttgtggccctgtacaaaatacagggaataccatatagatcattaattatactaattatacacaattcgttacagaaatctcagaaaatatttggttaaaagaagtctttaacctaatcaaaatgattttccgtagattagataaaagtccacgaaggtataaagagtttcccattaacaatcaatgactgaatggaagaccataagtcactagtcattactcatggggggctgccgccattagggtaccatcaaaattcagcaatatcctgtttttcctttttctaatgggcgatgctacgaaagttttgagtatttcaacgatcgcacatcttctgcaagtgacaacatgcctatatttatcatcatctcatttgagaaaaaagaaaaagaaaagtgacttgataaagaaagaaatatattatataaatgtgaaatgctaacaaacaaatgttgttagaacattatttaaggaattaaaaatagaatttttatttattgaaatagataaaattatattatttttataaattttttttttgttttttttatgatttttataatgattttttttaatttcttaataatataaaaaaaaacacgtcgattaacaatgtataaatttaaagatttcgaccaatgtccattaggtatattctctgtttttatatttaactttagtaagaagtaactaacgtcggatttggtttttaataaatttcagaactcgcacttgtttatttttttcttattattaatttactagtaaatgttaaaagttcattaattgccaaaattattattttttttatctctttttcattttgaacaaattttacaagaaaaagcaattattgcattaaatattaaccaacaataattgggtgtaattataaacacattatatacctccaggaaaaattattaaagttcaaattctaaaaaggaataataattacaaatgtttttttagactatgttttttatacatttaatatgtatcttttttttagcctactgcctaagaaatagcctttttagtttataaaaagacccatccttaaagtaaattataacataaattcagaaaagattccacagaagaaaaaaaggaaaataaatttatcgtaagatttgaattaaagcattttaataataaaagacagtttaaaaataaaggaagcatgccgttttatttttagtttaaggaaagacttattgttgaagtgaattataagcaaaaagattaaatatattcttagctcgtgtaaatcagtaatattcatgtttagtctctcatcttaatactttatttatagaaatgccatatgtgatcttttttcataactaaggagaaaaaatgagacaattttttttttgaagaataagaattatatctaacacattttcataaaggaaagataagaagatatatttattttttaggaactatgtggatgaattccattttatttaactcaagagagaaatcatgaaagaagaagggtggtgaaagaaatgcattataagatttgaatttatgcactttggttacataacatttaatttttatttcattttaatttatattttgaagttgattgccaacctcataaaatctatttctttttatgagctcatgctccttaggtgccacttacaatatgttattttccactaatggacaagaaatatttattgttaaaaattctttaatttatttattttgctattaagtcactcattttttatcagtaaaaaaataaattgattaagaaagaagatacgggtacaagggggtacccagcccttacacttccagacaacaagtgtgtgaaccagaatattttgctatttagtccctcgtgaatttacaattgctaaaaagctcaaatgagaaaaagaatccgcaaatccactatagactaatagactgtagtattactttgctttgaggatctgattcaacggaggtggtgtattaatttgcaaaataggattgagatgcttgatttcggtgtttgtggcaatgagatctcatgatgagcatctccaaaccaaaagccccaccatcaacctttcattctttgtgtcactattaatgatatgaagcagcctctaaaaccatgttcctatccttattccttagacataggcatgactagcacggaattaccattgtcggattgtgcactacacaccaatcgatctcataagcagttacttttgtaaattaaaattttgtatccaaattaccttcccattgtggatcaccaacatcaatcaaccagggaacataaaaattaaggtgaaatgatttatttaattctttatcttgttttttagtttaattttattttttctttttaaaaaattattttaattccttacatttttaatttgattctaaatagtcatttcgtcaatccaaaactaacaccattaatcaaataaatatattagcagttaaaaattactataaaacgtaacattatccctcctctttttctcccttcacttctccctctccctaagcaaaaacaattaataaaacggatattatttagagaatcaataacaatcataaaatgtgacaaatttacaagtcacacagtgtaattacaatggtagatctatcggagttagtgatgtgaaagtcatgaaagctacaaaaacagacctcgaaatcacaacaccatgacatgcactccacaccatagatatgcatttcgtcatgacaagtctacactccacaatatagatccaccctctgccgtgacacatctgcaaaggacttcgccatcactccttgacgacatcgaaaagattcctaataagatgtcgtcgaagaagactttagtattcctactccgacgctaggaggatgttgtttggtgatattgtagctcgtcacaaatgtcaacttccccatcagtctcgtcgagaaaacgcccctgcatgtcgtcgttgagatggtagtagtgttgctggaccaccatgtggacaccaatgtccttactctgggaggatgtgaccccgctggacatcctcagaaccctaacatcggacttcctcctagataattccacccacattgagaagtaaaggtgaaagggtataattgaaaaatatttgtgatagtttttagccgccgatattttaaaattattagcggtgttagtttacaccggatagaatgatctatttaaatcgatttaaaaaaataaaggactgatataaattttttaaaagataaaggattaaaaaataaataaaaaataagataagaaactaaatagatcatttcacctaaaaataaattatataaaatatatcccatataagcaattcaattgcttcgcatacaaagattaaatttagtctaaattccatcatagtagcgtctcaattgcaatttttttttctattgacaagtttttgtttttatcattaactatattggaacttatactgtaacatggaattttgtaaataatattatatataataattagattataattttaattagcgaagatctaggttaattttttttgttatatatcttctttaatttaatagcttaattttttgtcgattatcaatgtgcattgcccaacaaataaaatttttaaaataattattataaaaggcaattaacataccattcataacaaattatgtgattacatgatactataatttttttttcatattaatattaagaaaattcaacggaatctaactaatgctatttgtgctgatgcagacatgcagtggttataaattttcttcagttaaagtcaatttcagtcatatatttttaagcattaacctgtaagatattgacaaatgatatttctgattcattctcgatggaaatgttagttttttacggttgtactccgtataattaaataacaacatttacatgtaaaaacaatatttaaatttataaaacttagataaaaaaaaatttaaaacaataaatgcttgtatgaagaagaaacatgatgccgcaagtaatcatgtaccagcaatctccctaacttttcgcatatttgcttaaataacttatggcaaagtctaacaaagctcctgatttcgccaattccatgtcaaacttcaacaacatttacatggaaacttcatttgagccaaagtagcaagagatcacccctcccatgagtccattttgttttattctctaagaaacctcaaacaattgaaaaatatattgatcccggccatgatctattatctataaaccattcctccaaccatttcatgccaatcaatttggtgcattgatgagactctaaccatatcttgctgggcttttttttttgttttcgtttctttaatagtatcttgttttgtgaaccatatctttgatacgattaatcagtggataagcactgaccactcttttcatacaaacccttcattgagtttaggtggacattatattatattttattcatataattgtggggttacgtgggatggaataggaaagatatttgtatattattctgctttgaagaaaggtgcagggtcgtggaccatgcccaaattgcccatagttcccctgttgctgactaatgagctctgagacaccaccaatggacacaacggaacacggtttaaaaaatagctactctaatagtataatggaaatgtaaaggaattatggagtgtgacttcatcaccattataagcattgaatacacatatgtgaagtatcattcttagcattaaaatatatacgcgtgaccatcacataatgtcataatcccatgtttcacaagacttagatgcttgcaaatatcagctagttcaaaaataaatttcatattaattatgttaggcataatttcatacatctatcagatttcctcgtacattttaaaagtaagtagaaattaccttgatccatgaaaaacataaattctgcaatcttctttatctcaatctatctcttttcctctcatgttgttgatgataattaaagaaaaaaatgcttatgacagaaatagaaccttttctcttttattaataaactttaatcaaattagttattagaagtttattaagtttccctaagtttattaaaagtttattaacttctcatatttatcaataaatttctttattttattaaataaagtttaacccttaattgacatgaattatattattctaatagcttattctcaaagacaaaatcttttctttctcttttttttttggagtggggggataatattgatcaggaaaatagaaaagaaaaggacatgagaagatgacgctgtttcaagtgggtatgattgatggtttgaaatggcttaattacctgagacaggtttatgccaatgaagagctgatatatatatatatatatatatatatatatatatatagtaaagtaaaataatattagataagagtgtgctagtaaaccacttaacactttagaagcattgtcctcttacttgcatattttttaacttatgtctaactacttaacgtggacccgttctcaactaattctcctaaaagccaattgtttcgacttagttgtgacttgtggcttgtttttcatttttagtttgaacttgtattttaagtttgggtctcaaaagtgtagggtttatcttcatttataattaaatataaaaaaaatattttctaaaaccgaataaatcttgtttttattttatccaaagttcaagttaaagacgtgaataaataaagtaagggaaagaatattgcacggaaaaatatgtaatgtacaggtcaggagagtgtgaaactaatggcttaacggtttaaaatttgttggattaattaagtttcaattattaaacttttttaaaatttaattttcggtttctaaataaaagtttcactagtcacgattctttaactttttttcttttaactatttagttcctaaacaaaagtttaactgataaagattcttaagttttttttaaaaaaattgatttttagtcttgtaataaaatttgaaatccattatttttaataatccaatgaattttaaggtctaaaaattgaaatttttataagtttagagacattgagcagttaaatttttatctaagaactataaaatttaataggaaaaagttaaaaaattatgataaatcaaatttttgtttaagaactaaaatccaaatttttaaataatttaagaactaaaaatttagttaacctaaatccttttaagataaaattgcatttcttcttataaggacatgaatcacatgatgagttgaaaatgtccttggaataaaaatggaagaacatgtcatcctcaaagggtaacatataagaacacctttgtttcataaaatcttcttatatttctatgaatgatattcttagaaatatagcatgaaaatatcattctcaagttttttttttaaaaaatatatatttgattatattttaggttatgtttaagacattttagttagtttctaactttttttattacctaaaaaacttatttaactgttttgtaaacaagttttttttagtaacttgtattttttgaaatcttatttgaagtagcattttttaaaatattattttttaattttttatattttcttccatttttatcctcaatatactaaccaaattttctaattatcatttttaaataaatcataattttttccatcattttatacttttaagctcttttaacagttagttttattgaatacttatagtttaataagtgaactttcaaatactaactaatttttaagtttctaactaacttttttgttagttttgctactcataaccttcaaatgacaaaaaaatattatatactcactgtataaaacaatcacatttattcaatcataggccactatatatgataaatttattaatttttattataattattttaaagtaattcaaataataatttatgatttaatgacagtgtaagactgatttatatcgttagaatacaaatattaaaatcttttaacatttcttgtaataatttttaaaatttaaaataattttaataaaaagaaggttgaatgtgtattacattgcgacaaaaatattactttctcacctctcatagaataaaaaaaaaagaaaattataatattcttagattcaaccatacccattttttttttaaaaaaaaattatatcaaatactagaatatatatattccatcttcatattcccaagaatcaattaaaattcagtgatacaaacgtcatatatgcctacagagggattaatgtgagaggcaagtggcaagaaaggaagtgtggaaagcaaaggtgaaaatagatgaaggagatatggcgttgaatttgactgggtacgcataggctactgcaatggctctattatggcagtggcagcgacaccctaccctttcttttcttttggtttggttcaaaaggaaaaatccaccctctcgaagcacaccaccattgaccacactgcaaccctcttcacacgtgtgcgttgaccatttaaaactactatgtttagtatcacgtgccaatgctgtgaagtatgaagtgccgctgccatgcgtttcctaccgacctaccctgaatctgaatctccttactttggatgttataattataattattactgtcattattactgatatacgataacagaatcttattagctagcgtacatgtacaaaaaatgaaatgttgaatccaaatcttttatcaataataaagaatcagttttttttttttagctgaaaatgttttatttttaatctttcatgaatattataataatataatcattttttagttgtattatgggtgttcttgattttttttaaaattattgtactaaatagattttgaaaatcattttagagaataatagagaaaaaaagttaaacatataatttagttcctgcatacgttgtgttgcggattctcagttttgtctttatttgtaaaactttatcaaattggtctctatacatacaaatcttaatagtttagtctctaccatcttacaacgattgctaacttccttacacattttaaatttggttcaaatacatataatgcattcttaatttagttgttatacatgtagaacatttttaatttgatcactctatgtgtaatgcattcttaattcagtctaaaatgtaagagaccaaattaataacgcattatacacacatgaattaaattaagaatttgttacatgcatgaagactaaattgaaaacgaataaggggattaacaatgtcatagaacaaactgataacaacatctatacgtctaaaaacacatttaataagattttatatacagggaccaaattgagaatttataacgtatataaggaataaattatatgtataatctagaaaaaaaatccatttataatgtaattttgaaaatagtttttgttctacaaaactcacttacaacctagcatatgtattaactgataaaagattattttcatagaagatacttttgattttttttttaaatagactacaaatattgtttaatggtggcaatttcgctctagctagtaacaaaactttttcactctgttaaaaaaaaatactcttaaagaaaatattattttagagtaaatactaatctatttaagcaatattttttaaaaagattttaatataaaataagttaagtttttaatgcaatatattaaataaattatttaaaactataattgtagactttaatcatttaaataagtaactgaaaaatgagggccaacaaaccaacttaaatagcgcgagtcacgtaagactgaaatgaatcaatatatctcaacctaatccaaatttgacgtattgtaagatcacccacatatagcctgccccacaaaggcctaaccccaattcacaccaccattagatacaaatgaaaaaaaggtataaagtgctgaataatggcattatctggaaccaaagtcaagtacactacttttcatacgtatagttttgaaggtctttttcactgaaaggaattaaaactcatcccctgttataattaaaattgatccagaattctaatccttgtatttgatttgtatcaaattaaattctaatttcattttaatatctttaacagaaatttactagtaatttgcttactgctttattgtgtacagtggagagtgctcactactcataattgatgaaatgaaatctatctaatgctaaattaagccctaagatgaaatgaagtaatgttcagagttctctatataggctacaattattcccggtatgagacttgaaataggttactaaaaaggtcacttctataatcgtatgccgtaaccacaagccaaaagtaaaactacaaaaatgtagttaccaaaataaaataaaataaaaaaaatgagagtaaatctattccccttacaggtactttcaatgcaagaatcacctaaaagaccacactaacaaaatatactgatgaaagtacatatgctgtcaaaattcgtattcaatctatagttgaaaataatccaaaactagaaaacaaaatgaactacatacgttgtccttattagagaagacaataaaataaagcaaaaaattattaaaagaaagttttgtgttttcactgtcaatatgcaaacaagttgcagtgaatattgcaacccaaaagatgaattatgaattgaaataaagacatacatcaacagtctagaagacacagccaagttgggaggctttatttgggggcataataatgaaattttttcctctgccctctaattatgctgctaaaatataagaattgaaagggacctctttcaatcttttataacatctagataggtaaaagcaagtggtcgatcgctttggataactacgatgactagtggcacaaaagctagttacatgaatattagacgcattaaggtgagattctttattgtgtgaaaaaattgaaacattgaaagggagaaaagggaaaatggttgcacctgtatgcaacacttgtgtgtgaaggtgacaggtacatttatctggacgaaatatttacttaccaggaatacaatgtttatgatgagaataatgtcaatttaagaaagggtaggatatgtttcggtagtttgtcgactgattcttttagtttaagtctcttcgcactcttacactcgaggataaaagattatatattgtattgttcatttgctatccctagttggtaatcgaccatcactctttatttaatatcaacaatctttgatgtgaagtaatggtcacctgaagatttcgagataacaattatgataattgatgaagaattgaatgccaaaattatggttactaggttgagcggacacaaggataaaaagaccaaaagcaacttaagaaaggcatatgacattttctcacttgaattaggttttctaaacgttatgtacgatctacctgcaggaacatgtagtaataattttttttccctaatgtgatatgaaattatgtggtgtaataattaagattctgctcccattaccctgtttgcgaatgaatgatgtattctggaatgtagttaggacatagatttcaagagggatgggttagagttacttggtaggaccctgcaagttgctaagactttaagttgtgagggaaaggccggtggaggaggcaactttgaactttgtcccaatctctctttgtacttttgcgtttggcgttggcctctatcaacactgcgtaatcgttactctccgtttaatttgtcgttaaatgaaaaatatgaaatgacttttctcttgctgtgccctcatttacttcgttagattaatactacatactatcactgtggcaatcaaataataaaaaaccttttctaaggaaatataaatgcataatcacgtatgtattaatgggaaatatttataattaagtttaacttagacaaatgtatcatgcatgaattatatatttaacagattttaaatcaattagacacttatccatgtatctgaaatgggttgatttcgtcttaaaaaaatatgtacagtgcacgaaatattcagtccgtgtcattaaatatcacaacgtcaatctgttgatgcaatttgaatagataacatcaaaagcgagaaggaatcgcgttcattgggaaatttgtcttttactatttgacttttttactagatagattttagattagttgaactatcagtgttattagttttatttatcatgttcattgcatacaaagagactaattataagcaactactttatatgaaaaaatagagattaatttataaagtaaattcttgttttaattttgacattgtatttatcaacatttttattctttgctttgcaaaactctaccttaatcagtcactcaataaaacattattcattttagttgttaatgttagctgaaaatattgtacaaaaggattaacatatataaaagacattctttaaagtataaaattaaaataaccgacattcattaaatattacaacgtcaatctattgatgcaatttgaagagataagttcaaatttgtcttttactatttgacccgatagattttatggtagttgaactgttactgttatttatgtaacatgattcattgcatggaattgaagaggctaaacaattacgttatatgaacaaaaaggctaaattataaagcaaattcttatttcaattttgagattgtaaatatcgacattttagtcttttggtttacaaaacctcaccttaattaatcacactataaaacatttttttttaaaaagttacatatagaagaggaactaagtctctaggaaacgaaatgtgagctatgtcagctcttacaacttcgagaacaaaactaggagcaaattcaaaaacactagtgaagccatcttccatagcatgcttagccaaaccatatgcaacttgttggcttctctatatatatgattccaagtaatctctctctcgtttttgtggactaaatggatctccctaatgatattataacaagggtgcaacatataacactcttcagaaagaagttccacttccaagggagaatcgaagttcacgcaaatcttctgaaacctccttgaccaagccaatttgagaccaaccatcatcgccttcaactcagcaatgagaactaagcacccaccaagattagcaccaaacccacaaatgaaagatacattgtgatcttgcaacactcctccacaagctgacttattcccttttccgaaaacatctttcattttagttgttaatgtttccggcaaatatagtacaaaaagattaaaataagctccaatctttaaagtctaatattaaaataaatggcattttaaatcttaatgattaatttctttgaataaaaataaaatgtaaataaataaacaaaataaataaaaataatgttagacttggcaattttagcctaacttaattagttgacctgaacaaaccataattagaacttatataattctaaatatgtagtcccaaaaaggacatgaatatataggtttaatttgatgggacctattgggctaggttgggctagtaaaatattgactcggtcttataagttattatgttatatttttttatcaatttatatatgtttctttagaaatttgtatattaaatatatttaattttgattgtttatttatttttaattagcgataatttgatacttggcttgttggcctgatatagggctagggtggaccacaaaaattataatcgtaccgagacaacctgatttacaccctctaaattgaaatatgtgataaaatagaaatgaaaagtttgagtcctcacttttattcaggtaattaaaatgaaataaaaattaagagacaataactcatttctatgttaaaaatcgtcataggacaatgtcatattttgagttatgcttatcggtttgagatgctttgtgtcattaaaaagcttagagaaaaatttataacttatatcactactgtgtaaatctaaattaactattatcttgttaaaaaataactaaaaagtaggctattttatcattgtaagaactcgtgtgccatattccttttgctctcttcttccattctcttcctttcacttttttctggtatgaaaaaaaaaacaaaaagtctgtgacactaaaattaaactaggttcctgatagatcagataaaattgtaaataccctctttttcatactactctttctatatataatcgaatgatttaaaaaacaaaaatttgaatacttgaaaagtgtaacaatggacaagttactctcatcatcctttttgttcgctctcttatataataagaaaactaccaaatagtaagaattatagtagtgaaactcggtccggtcattaactcggtcgaggtagtgggtcggtgcttaatggtgcaatcgttgggtcagtgattagcccgatttgacccggtatatattaaaaatttaaaattatatatgtatctattatatataagtatataaataacattttttgagtaagaaaaattcattcatactccaaaattcaaaataaaaattgataataataagacatcaaaacggaatgatagaggtagttcattttattttgtaaaaatagtcgggtcggactgatccaattgtgatctagtgacttaattgaccgaatttgatcaagtaatcctggatcaattacgtgaccaatccaataatgaaattgactcaattaaaccactgggtcctgattggaccgatcagaccaatttaggtttcacaactataataagaactaaacaaaagaggcatatataaagccagtctaatgctaatgtaaagtgtgtgacttgtgacgattattttattttattttactatcaatcctcaaacacatgtcataaataagtagtacctaaaactgagaagctaaaggttatttaccaattttcctttaataaaaataacaaaacctttggagactttaaaaactccatctttagtataatagttacacctttgataatttagagcattcgaaaaatgagatttttctttaagtatggtatatgtcgaacattagccaaagttctcacaatttcaccatgcatctccatttagattgttctaatgtcaatgatctttcaacacatgtcatttcctagaagaacaatactagcatttatttaactataagtcttataagaggatatcacttgggaaaactaccaaattttggcgggtattgctattggtattatcatttttcaaatgacactactcacctaggtgccttctaagcatactatgaaattatccttaaaaaatttgtacaacgaaatcatgatttcgttatgcaatgagacagtaaaaaaataacaatggaagcacaattccattataaacttgttcaatggaatcgtagtttcaatgtatattttttcaccctcaagtaacacaacataaacattctgttgtattatttgattccatccacaaatgtgtaacataagtatgattttattttgttatttttattttcatccatattttacaacggaatcatcattttattatgaatttttcaaaacaaaaaacaaacctcaatggaaaatacgattatgttgtgttttccacccaaaacacaacgaaaatcgtatttcaattatgcataaaaaaataattaaagtgtttacctttacaggcatcaataaagagaaatgagaaagagacttgaaggggaaatgtgagggagatggagagagagatgcgtgaaaggaaggagtttggggctcaaagcaagagaaatatgagaacgagagagagagagtgtgaaatatgaggaaggtagtttagtctagtttcatttcaaaaagtgttattagtacaacgttttaactaagttaatacattaattatgttataaaataattaatatcattatatataacactaaaatttctaatgtatatttaatgcacatgtaaatttacataataaattttatgataattaatttttatctaataattaatttatttacatatataaattataaataaaaataataggtttaataaaaaatttacattattaacataaatctactaatgcatttttttgaccttattatagtcaattttgatctaataatgtatttttttacatatataaacatctaaatacatcattcaattaaataccaaatttttttaattatcaattattgtaataaacatctaaatacatcattcaattaaatattatatttgtgtaattttcaatcactataataaacatccaaatacatcattcaattaaataccaaatttgttgaactattaattactataataaacatctaaatacaacattcagttaaatatcaaatttgtttaattatcaaattttgtaactaaattaaagttataaaaaaattctaaataaattataatttttttaaaaattcaaaatatacggattgataatttgtatggttcatacagattgtatgaccagacggattgtcaatctgtatattttgaaaaaaaaaaatgcatagttcttcttctccgacgatgaaaaaccaccaaactttaccaaacactcacaaaagaatgctaacggaagcaagttacagtaagggaatgcagttttatgaagaaaaaaaaaaggtgctgcataaatgaaaaagctaatctatcatttataactgaaaatatccataagggcattttcgataatttgaaacaaaaatattggatgcctcaagcagttcccataagtcgaacatgctggcccaatcaaatccatcacttaagcctagttaaatgggttacgtgaccagtaataaaagatgaaatctactgtgccacgattttcatttctgcacgtcaaaaggttcaggcacacttcaaatatctttgatttggtcacgtacagacgaataggaagattgatgaaaaaaaatagcataaggataataaacaatattacccataaatcgtgaaaataagctaaacataaaataataaattaacttaatttggctaattagaacagataattaaaaaatgaaacgacattaattcctggaaggctcgaatcctttggtggactttcgtcttttccaagtaccaacattccagaaagaaaaaattgtggctggaaaagcttaactagtaaaaacacaaacgactaatttttttttttaaaagttataaaatcaaattaattctgctctgtttaatgaaaaacatgtatttcaatgtagatacatggttcagattaatactagacaccacacatcccaattattttcaatacttcaaaatcagttccatcaaatatacttgtactaaactctaaactagattgatactaaattagatagatgaaaacaagattgcaagtaaacctcattgccttggttgtataaataaataataaggttccaagtgaaagtctatttaggtttaaagaagacaccaacaagtccatgatgttgtacataaacttttgtttacagtatatgttttggttggttttagtctgatcacgtgcaatatctaatatttagtaataatgaaagtatggaaattcttcaattgtttgaactgttttataaaaaccatttggtttggatcgaacttgtttttattaaaaaatggacagtttattcataatataatattttattttatttataaaaatcaaaagatagatatcaaaagattcatatcacttgtatatctttttcaaccaactaactgaactaatcaattatgttcatgaattaaatttgacattacattgtcaaacctttgaaattgaatggttgattgtaagattgaaaatttattttatttattttggaaaactttgacagtcaaatttcatgaaataatttatttgagaattctaacttgcaacagtgccactcctcagagtccaagggaccatagcctttcctgtgtttcgggagtatgctttgaccctaataataaaaattatagcccatttcatactgggcatacaattatagcccattcatacaatttccttttttgtgattgggcctacaattttaacccatttatttatatttttttattaacattctggttcattaagaaaaaaaagattatgattaatctgaaatttgacagtaaagcctgacaaaaaaatattttcattaaggatagaattagagtacttctcaaacaatatttatttatatactagcatgtttgttatttctttctttctttttttgtttatttttcataataagaattgaataaagacataattatttgtgctattgtgtttttttaacttcataataatagtttttaaaccaattcttttactcacagataatgagagttacaatctctttgaaggatcattagctagtgtatgtacattatatagcaattcctagattggtatatatatatatatatatatgtagattataaaagtactctatatctttcaataattatatattatttaaattttgatggatacaaataatatattaaataattttaaattaaaaaatggttttataaatatgatttatatgatagtaacgttcaattaaatagtggggttggaaataaatatatttgataaaacgttattgaactgtttaaaaataattttcatttatatttgatataatgaaagtgactcttcgtctcatatgtgcatctatgagtgcatgtgcgtccagaacaagttgcattcatatttgtgtcaatgaagtgtccacggaatgacataatcctttggttttacatttaactaagaccaaatgtttattttcaatctagaacaagttgaccatttaacaggattgtggggtaattattgtgaaggacaaaccatatagcaggatcatgcggttttgacaattttttttaatcatattttttatatgaagtatttattgattttgtcaaataattaatttccattgaaaaaatttgactcatcatctttagtgaagttttttttttaattatatttttttatcaacaaaactcaaatagaaaaccttatttaagagacaatttgattgatatacaaagttgattataaatattaatttgggaattctttctctcaaggcaattcaaccatcaaaatgataacaggatcggcccaataagtgagggttaaaagtaaaatttgatattctttttacttatgttaagtctttttttttattatctatatgtgatttttttgttttaaatgattaataataaatattttttaataaatttaagtttaagctttaatcattttatccgtaatggacctgcctggaatgatgaaatacttttgaacttagttttcaaaagagaaatatgaaaggaataattaattaaaagtaacaaaaaatgatgaattcgaaatatcagtcgaaatatgcaatgaaacagtgattaaaatatcagccaaatgacaacaacataaaatgatgctcgaaaaggtatgaatgaattcagtttttaatttatttgtttagtttataagtttgtgtaactcataagttattctttctaagattaaaataacttttgttaggggagcttagaataacttataacttataagtctgtctataatttatgaatttgtctaaagcatcgttcttggcggaacaacaaccatggtgcagtggatttaggtatcaaaattcggaccaggaatcttctgttaaagggttcaaatggggagaggggtccagtgtttcagaatgtttggagaggatggttactgggtaggagatgaagatgacgccgagtgtggagttccggtaacgaaaatgagaccgccgcagcagcctttgggttttccggtgatgccatatgggaagccggaaaagccactttcaaattcaaaaaatcttgatttggaagaagatgtaaggaaggaaactttgaagcaagtgagtagtatggtagagacaaaggggaggaggcaggaacaaaagatttagttgtgaagggggaatacgacaaaggagaaagagagtgtgcatttaagtaatagtaaccaaaaagtaaaacaataccttcttaagtggaaaaggtgactaataaaagaagagaaatagatgggccaaaggtacatggactaacgaatcaggagattgaaggagttggagtgccctcgacgatgaaaataatgcaactgtccctcagccatatgacatggaaattaaacgtttcaatatgggcaacaaggatgaaagagaagccattgagaatatgtaggggggatttattaatgaggatacaaatgagaagaagcagcataagggtggtatcatcattaaaaagtctacaactacaaggaaattctttggcacgataccagttaaaggaggcataggagggtatcttgttcgtacaataaaggaagctttgggaggtagcatatgtagtggtgtttgtgttgttaaagatgacaaggctgaagcaaatcatatatgggatatagcgacaaatatgagggtgctatatgctagaaacaaggagcaaagatggaaagtatatgtagacaagccgtagcagtgatatggggtaatgatgagttcgaatggaaagagtctccatcaattaatcgtgcaggtggactattgtgtatatggaaaaaggagattatatggatatcaacaacttctttgctgggaaaagctacgtgggtgtacaaggtgtttggaaagaaggtaatattccttgctttatccttaatatttatgcaccttgtgatttggaggaaaagaggaaactatgaccagaaattgtggagccaaaaaatcaagtaaagataacttattggtgtctagctgatgattttaactcggtgagaactatggagagaaggagagataataacaatgtagcaattggtggaagagatatgaacactttcaataagttcactagagatttagaagtggaagatatttcgttggtgggcaagagttatacttggtagatcgagcaagtactccaagagtaggtttgatagattccttgtatcaaatgagtggtttcaagaatggttgagtagtactcaatatgtcttgagtaagagcttttcggatcattgtcctattataatgaaaaataattgtgttcactggggggccaaagccttttaaagtcctcaattgttggtttttggataaaggtttcaaggagaaagtggaggaaatatagcaatcgtttgatgtccaaggaagagttgcatacatatttaaagaaaaactcaagcttcttaaaaaggaactaaaaaagtggaacttggagaaatttgaaaatcttgaaaaacaatgcaagaagttgattgccaaggtaaatttcttggatgtgatagatgaagaagtggggttgacgaaagaagaaattgaaagaaggaggatttgtgagggggaatattgggagattgccaaaagacatgaatctttcttacaccaaaaatcaagaactaagtggatcaaggatggggatgggaatacaattttgtttttccataacgtgattaattggagaaggagaaaaaatgccattaaaggtcttcaacttggtggtcggtggatagaagatccatgtagggtaaagagaggtatattggacctttttaagaaagattccaagaaatttcttttgagaggccaaagtttgatggagttcaatctcattatttgcaaaatttagtgaggccgaagttaaagaagtagtgtgggaaagtggtggagacaagagtctggtgctagatggtatgaatttcaactttatcaagaaatgttaagagacattaatggtagatatattaagcatgatacatgggttttgggggaatggggcaatcccaagagctgaaaattcttcgttcatcactttgatccctaaagaccttactgagttttggcctatatccttgatagggtgtatgtataaaatcatcttcagagtattggcaataagattgagaaggataattcataaattaattgatgagaagcaaagtgcatttgtaagggggaggaacatgttggatagtatccttattgtgaatgaggtggtggatgatgctaagaggaggaagaagccatgccttatctttaaagtctattttaaaaaggcatatgattatatttgttgggatttcttgatatatatgatggtgagaatgagctttaatcataagtggatctccgggataaagacatgtttggagatgacaaccatttctattcttgtaaatggtagccctacggaggagtttaaaccaaggaaaagattaagacaaggagatataattgcttctttcttatacctaattgtagcagaaggcttaagtagtctcatgaggcaagcgttgaaaattgggaagtatgttggacataaggtgggaatacaattggtgtaagtatcactcttgcaatttgtggatgactcttttctttgtggaggcatctatacacaatatcatatgctttaaggcaactatgagaagctttgagttagtatcatggcttaaagtcaattttcacaaaagttggttgggtgattttggaatggattctcaccttgttcataggtatgctcacttgttatgcccttgcctttcaaataccttgggattcctattgggactaatcataggagggagtgtgtatggaaaagtatcttggataagcgtaggaataggcttagtagtgggagacataaattcttggggggggggggtcactttgattaatttggtcatttctcctcttcctcttaggattccggttggagtggctcaaaaaatcactagtctccaaagatatttcttatagggttgagaggaggaggaagatagcatggggtgaattaggatgaggtttgtaggccgagggagctcaaagggttaggtataaagaataatattaaacatttcaatattgttttgcttaggaaatggaggtggagaatgatggcgaagaggaagtcattatggtgtcttgtcctaaaatcaaaatacgaaaacttggatgatatgtcttttaggagagtgtcacacttgaattttatattgtagaaaggggcaggtgattgaacnnnnnnnnnnnnnnnnnnnnnnnnnnnnnnnnnnnnnnnnnnnnnnnnnnnnnnnnnnnnnnnnnnnnnnnnnnnnnnnnnnnnnnnnnnnnnnnnnnnnnnnnnnnnnnnnnnnnnnnnnnnnnnnnnnnnnnnnnnnnnnnnnnnnnnnnnnnnnnnnnnnnnnnnnnnnnnnnnnnnnnnnnnnnnnnnnnnnnnnnnnnnnnnnnnnnnnnnnnnnnnnnnnnnnnnnnnnnnnnnnnnnnnnnnnnnnnnnnnnnnnnnnnnnnnnnnnnnnnnnnnnnnnnnnnnnnnnnnnnnnnnnnnnnnnnnnnnnnnnnnnnnnnnnnnnnnnnnnnnnnnnnnnnnnnnnnnnnnnnnnnntggaataaacttgcagaatacagaaacaaatttattttccagcagcaaagcgctgatttggattcagtggtggaaattatcaagtacaaatcatgggcttggttggaggcaaaggtcaacgcaatccacttttcatattacgagtagtattctgatcctggaatttgcttacaaagtttacggttgtgactgtcattaagaatctgacttaattctgtatatgtgggaatggtagaggaagtgttttttggtatattgtttgttattgtagcgatatatcgtttcattgccttatgggaatatgaactctgcagggttggtggtgaaggaaaagaagtggatagaaacaatacatgataaatgggggcttctatttaatctttgtatatgggagtttctacttgatctttgtattaactttgtaatgactttaggtacttctggtacctagtaatgttaattctttttggttgaacaaaaaaaaggtttgtctaactagtctaacatatttagtaaataatttctattaatagtttataacttgtaagatataattttttttcaaactgcttattctttctttcacataatatttttaatgttatctttgctaattattataataatttaagtagttaatattttctttaaaaaaatatacattacttaattcaaagattaaaaaatattagacgagaaataaatgtccaagaaagattggtaattggccggcggtttacacagtcaatttctaataactaacagttttcttatattttttagaactccggattaaatttcaaagtttttcttttgttttgattctggcttaaatttcaaagttatactcactgatggtttcactttcatgaaatcaaccattaatttaaaaattcattttaaccgagtcttatgaattatatttgctttcgtattttttcccaccttaaacatcattattttcaaccttttcaaaagtatcaatttattttataagtcatctccaataggatcttagagagagattttaagttaaagatctattcttccaagatttaattattataaactccctcaagatttttatgttggaggtttgattcttgtagaagaatcatgaagatttacacttttaaaaaaaaatattttttagtgtctctctcttaaattctaacttattattgctggaaagaagaaaaataacaagaagaacagaataccaaaaacagaccacaatccagtacaatagcataacaatataattttaaacaaataataaaaaaataaaataattaaaaaagagggacggaggctagatcggcaatgaccggcgacagtcgtggtggctagatcggaggctagcgaaggaggtagggtgggtggtgggggaagagagaaaagaagaaaaaagaaagaatagaaaagaaacgagaaaggagaatctgaaggggcaaagggggtgggtggggaaggaaagagagggaaaaagcagtaaaaaaaattattgatggattaaaagtaaatttcattggaaaaataatttaaatatattttttattcttggtaaattttcaaatattgtatttggttatcattaataaattttttcttgacttttgttccttgaaaaatcaattatttatatattcccttcatgccataagactaactctattaagtagtccatgaaatatttttagattgttttgtccctaaaattatttttatcacaaccattgatatatttaccatcaaacggcgacatttcaagttgacagaactaacataatgatggggacaaaatacaaaatataaaaaaaagtaccaaaaagtcaagaaaaaaattattaaaaatcaaatgcaagactaaaaaaaaatttagggataaaaaatatatttaaataaaataaatatttagataaatgcaaaattgttgaaagacgaaaataaaatttatgaaaaatgatagattaaaatatagtttataaaataaaattagatgtaactaccccataaactaataatctacgtggttgtcatattgaagcatttaaaatatgctcaaagacaaatataccctattgtcacagtaacaaagacgtaagtctaagtattgtaaccaaggaactaatttgcgatcactagttttaggaaattcatatgttatttaagtctatggtttgaaagtttagttgtcaagaatgcgtcaattaaatttgcaagaaacaaagagcaatgcacacaacaaaatctcaaatgggaaaatacaggattatgatttcaaatgtaccttaaaatcccttaatttatattttatcttaacccgaaattaaactttaattgctaatttttgtctgacttccataaacagctactggccatgaaccgttaatattcttttctcctaaaaaaatcctatttgttcgtgtaagaaatcaatttggagaaaacaaaaattatagagaggatgactaatagaaattattaatcgaattagaagtttaaaaacaatttgattattcaatgttcctaaacccgattatcttatatgtctaccaactaactacagtacaaacaccgccagtttattgattcatatatacatgcttatagtgacaatttctaggcaaaaattaaaacaaatggataatccatatgattaaaaaaacaggaattcaattaaaataagagatcgaggttttgcgggtccaatttacatcataaccctaactatttaaattagatagccgtcgaaatagggaagcacaaatttacagccaaatacataaaaatcagaaaagaggagaaaatccttttctctcgctctctaattcacccttgttgctgctgcttcgcacaaaaagatttcattttccacaaacaaaagatgccccaaccgttgcttacacgaagagacaatcatgattgttatatttataacaatcttttttacttaggacgcaaagagacaatcatggtcgtgcatgcttcaacgtgcacgtaccactgtgttgcaaatactgagcagaactttttgaaactatgctcctttgtacaaggttgtgccaaattaatagcatgaatgtgctctcagttcaaagtggaaacctcaaagacaagcatttagcacaaccgtgctctagggcacaatggtgtgctcaacttagcatgggcatgcttaattaattagtcctcaatgattttggccttgcaagatcaagcacgattgtgctaatttcaacatgatcgtgcttagttctcaattttcctgtgcatgcatataatgttatttgtgtcaaactgggaagaaaatgtgtatcattccgaataacaataacataaaaataaagcaaattgattcccaaaactccccaagaaccatgttaaagtgattgtttatcatgcatcatcacttaaagaaacgatgatacttgattccaaagggccacaaattattaacgggagaaaaaatatactaaaagtgaattttccagaacatttaagaaccatatacatatttaactctttttaatttttaactcatttttaaacacgtgtcaactacatatggtattgttttgacgggttgaaacgtgtcaatctaattttgccatcactgctttagagagtgacctttccattggactaaaggcccagaattgctgtccacaatgcaatacgtggaaatgttttgattgtgcttagttcaagtttaaaccatgttaatctcagttttattacatgcgttaaacaaactcggcctccacaagtaccactagaacctagatgcgatttcgtgtactttgaaaggtagcgagtgggacatgcttacaactcgcaagtaacaagatctattaaatcttgcaaatgtaaagtattaaaccgtttaccgcaagcgtacttctgaaaagaccacccaacaaaacattaaagaaaatccttgtcgaaaaataggcacaacaaaaagcttccatgttgacaattaattcccatcactactatgtgggtcaaaattaaatcttttcatgcatgttccatctataaatatatttctgtacaccacttatagacttctagtattacgtttgaattacatatataatatctacggctgggtttgaaaattttgccttgtcttacgaatgcgatggtaaatgttgacattattggtgacagtatatttttaataacgcaaaagtaaaaatgttgttaaaaataatagaatattactcctcctttggccacgtttcttgttgtctttgcacgtgcacttagtcttagacacgctcaaccaaacaattgagatttgagggactcggttattcaatgcttttgaccattttggagatgtgacgtagtactatattgaatgtcgtaggaatacattcactaataagaattttcgtattaactttttgaccttagaggacagggtatgctttaatgctgccatattttataatgtaacaacttgctatttaaatatgtttatattctttaaacctaccagaaaaatgaatgtttttttatattcaagaccgtacttatttacaaaaaaatattttaaacattgattaattcaaatgaggttggaagaagactagtactaagtcaaagtttctacgacacctatttgtttcattcacaccactcaaatttagaataaaacataaaaaaattgaaataatcatcacttgaattgatgaataattttcatgaataaaatactatatgccaactcttagtttttaattatgatcgagtactaaaggtgcttacaatattgatttaatcaatgttcaggaaaaagacatccaaactatttttgttttacttttcaatttgttcaattcaaaattcaaattttatcaaatagttttttggtaaagtaaaatgtaatttataataatttagaatcgactttttaatattttagaaagtaaaaccaaactattaaatacataataaatgcaaagattatatgttttcacgagaattaaaaattttgatataattaacaatggactaaattatgttaattttcttaattgaaattaaatattgatctattttttaaaaaataattaattaattcatttgttttctcttaaatataatccaaaaggcatttgtttttcatttcaactttatggtttatgttaaatatagtcaaatcgatttgtgagtagtattattttggttagtaatgatttttacatgaattttattaaagtgattatattttgagaataaaaaaatttaaacactcaatcaatatttttttttctctcttcataattaatatattttttttcatatcatattatatcatcaatcaaattaatcatttatctttctttttttctcaaaatgtagacagcactaaattgtaaaaaaaaaaaagtttttcattttaatgtttacataaaaaaaagagttgtccttgatgtgaaaaaaaaaaaacataaaagaaaaatgtggaaatgtaagtgtccattattaagtaataatcttgttgggagtgggccctgtgggttgcttgggagtcccatctcagatgtgaaaatgcgctcgttgtgtctgcaatgctgcattacattttacgactttagaattagaaaggtgtcattcaattcaacactcccaacaatcacattcaccttttcagttttttttttttttcttttaataaaagtcgccaatggctttcccgttaatcacaaccccaattaaggaccaaatcataaaaacgccgctaacccacttaaaacccgaaccgttacccaaaacgcggcgtttggttcccccaacagtcactaaccccggttcaactcataacgctaaccatggttaactccactccttttaaatccctcacccgagcaataaaagcgagagagaaaaacaaacactgatagaaaagaaaattcaccagtgaacaacgaaggatagaagaaaaaaaagcttcagtgaaagaaaatggcgttgtacctggacgaagaagagatttggaagtgcccgaagcatccatcgaagcgaagaagaagcggaatttgccatatttgccttcgcgaccgtctcgtaactctttgccctgactgtgctaacgtgcgcccctgttcctgctacgccaccagctcctcctcctcttcttcctcttcgtcttccttctcgcgtttttccggcgccagcgactccgtcggccgcgtccacaacctcatcgagcgggagccagggctgcgacgctcgcgctccatggcgattccgtttctccgatcgaggtcgcggttctccggcggcggcggaggagatagggttttggatctcgatagcgcgagggagtcgccggcgatgaacggaagccggtcggcgaggtcgttctggtcaatgttcaagtcgcagaagagcagtagacacggcggcggtgagcaggagtgggaagcgaagaagatattggcagaggaacgcgacggcgacgggagcataaatccggtgatggcgcggtcaaggtcggtggctgtgacggcggtagcgagggtttctggcgacggagaattgagaccgcggacgaaggggaaagggtggttctttccgagcccgatgaaggctttccggcaatccaaggtctctaaagtggttcaagaacactctcctttgtatagaggttgaaattttgtagattaaaaaaatatataataataacaacaaatactttatataagtttatatatattaaccaaaaaatttcaaatttttattttgtttcagtacgatcttgatcctagtgcgttatggttcggctgggaatgttgaatttgcaatttgcaatttggaatacaaatacaatgacagaaaagtgttattattaattgtttagctactagtctatatttatgtaactatgtatatgtatatctcctacgatttgtgatttctaaattttagtgaatgttcgtcggagaatgagattatgcactggctaaactcttttgaaaatttgccttttttgttttgttgtgtttattattatttgggttagtgcattatactaagtctgaaaagatttatgaaatgatgtgtattatatgatagcaccaactcttaagagggcatgattaggctgtattgtacgatttggttgtgaagcgctaactgccttacaatttcatgcaaatgatcgttatttgatatgtttggtcccacgtaacatgtggttccaagctgattaatcaatcatagtgttttaggttttgtgttttttctttcttttcaagcctatctcttcactttgtttttttgctttttgggctgttatagggaggttcagccttaatgtgctggagtacggcatgtccgtgctgtttttgctttgctcctttcattttattttcttttaatttcctacatctcataaacttttggttcatgcttctaatggcaaatttttttactctgttttatcattgaatcactcatcttccccccgaagaacgggtatataatattgtttctaatgtttgttagtgttgaaaatttgatggactttaatacatttctttggtcttcaacttttttatgaccgttgtttattataagaataggagacaatgttgactgttctatgccgcaattctaaaattaagaactctgtatcacattaaattgatataaaataaatgatcaattttatagtacctaggtcgaaataaattagaaagaaattaaaattgtgctatgtttttttcttcctctttacaatgacggtaatatataagaatttaaaatcttgtacgagttactcaaatcctattaattactagactgaaattattgggtaaaattgttgtatgttacagtgaagagttcaagtaatatcacgcttaaactgatataatagttgtataattaaagttaactagaataattgtatttaaaagggaaaaagaaaaataaataatcatgaactgatttagcaaatttggcacgaattttacatttattttatgaagcatgaaaactataaccagattttattagtttttggaaagctagtacatgaccaattgtcaacattacccatatatatactatgcactcctgataataaaaaaatactatgtactttgtattaaactaataatatattaaatggaattatcatactagtaaaaaatttgtttgatattattgcatttattatttattaaatttcaattttatctcgaaattagtttatatctccttaaaagaatatgtcgctaagaatattaaacaatctatatgcgatcactctaaatatcaagatttttttttatttagccgtttgttttagaaagtactaatttactacacaagaatttgtctctctttttcatagtttctatgctagtttttggttttttttacttatctcttacatatgagagaggaaatatttttttctttgaataaatcaaggtatcttttattgaaattaaagtaactgtatatccaatacttaatttaaaacatttgattaagttaaaacaattatttgtcaattgatctacactgaatagtttaaataaaaatccttgatatttagaagaactaaacataaaatttataatatttagatagataaaatcaataaaaaaaatagaatgggttacaagaggggaaatgaataaatctaaatgattcgtcacggataaaataaacgtattaaagactaatataaaaactaggagaaataataaaaaaaattacaaagactatattacaaccttttcaaagtaagggaccaaaatcaccaaatagaatgtctgtaatgtggcgcgggaaaaaacacacatttaaacctctggttgtgtagtgtcggtgctgtttttggctttggttggtttgtcaatgtgctagataatgtttaactagctttagatcatgtttcaacaacgacctacctctggttttctctactaaaggggtttatttttcattttcatttttgttgtattggatacaggattgattgatttgttgattcctaacattcttatttcaaatgaaatgtccttcaactacttagaattgatacttatcaatattttccgagcaatatatactatacattttttttattcaaaattacatacaaattttgtgacacaaaagtacgaatagaacatgaaaagatccacacataacaatatacgacaatctataaagattccttgtggaaaacaagcaatttgatatgctatatttgctgatctctagagtctaaaagaaaaaactaacaaataaataaatgtctagagtcaattattttaccttaatcacgagtgatttcaatatttttaaaacgggttgagacttgcgaatctttaagtggatttccatgccttggagtgacacaggctacgacaatattttatgaaataatttggaaggtgagcacttgaattggattatgaagatatttctactatatttttttcgtgggttacatttctactgtttttatttttcaactaatacttctaattgatcgatttgattgtttcattttgttttggtaaaactgatcgtttctattataaatgtattttctcctggctagcatttgacatattaggatttaaaagaggaaagcttactgcttaatcaatcctacctcagttagatagtctaagtttcctcatgatccactcttgttaaaggtgttactgattctctgtcatcacatcctctaaactattactagtaacaaagtttatgttgtatataaccctgcaatgaattattttaattgactatttggtttttgggatgaaacacttattaattgattcttccaatcatctcaactaactggaaggtagtattaaatgtctctcaaattattgagtgttttttttactgcaaaaaaaggtgttaaagtattcattatttcttgatcttttgtttccttacagtttttttttttttttttataaaaaaatcatttcaacataaagctaaaggtatatataaggactagaaatatgtagttggattttatgttttagatttgagcaaaaatatcagtagaagaaatcgaccgtcatgcatggatgcttcaacatcacaagatattggggtagctagcaataaaatttaatcctgatgatggactccaataagactataagaagacataaggttaaatttggagctacagcgttaccttggtctactgtggtagaaaaacatggagtgtcaatggatatgtaacctttaaggttatgagcaaaaataacaaggcatgatattttttgttatttaatttgataggaatattgacggtgatgtcaactcaatatataactttagaattgttagaagaagagatagaattttaattatatacaaaaaaaagagatagaattttaattatatatatatataaaaaaaaagagatagaagtttctgtgggagaagttaaagctagctagccatggggattaagggcataatgaagtaataggaattctaattccatttaaaataaattggatttttgttttaattaaagtctaaagaggtatataaatacgtaatatttatatacattaatttacaaatgctttcaaactcaaactgtcttaggaaacgataatattgttaattcattaatccatctcactctaaagggaagaaaaatttataaaaaaaatgttagtcacgaggtaaatacatatagagcacagatctagactaacagactatgcaccacatgaaccaccaagatgtcaaaattcatagaaaaaaataaaaaattgtaacatttatttaaaagctgcagcatttgattgctaagattatgagaggatactgctgttcaagaaaacaaagacaggaaagcaactccctgaaaaggaaactgatcttgaattcttcattcgttttcggttcaacaagagatgtttcccctaattattcctggcgatgttttcctgcattaacaaacaaataattgggcaaaatgccaagtcctgtccttttttctacctttttctttgtcatatggagaataattaataaacagaacttcatgtagtattcttttttttttttttgacatattcatgtagtattctattcctcttattttgttgacatttcaattaaaatgaatatatttttttcattttacaatatcaataaagtattgaatattttttcctattatattcttaataatttattgtgcagtgaaaaaataaaataaaaatgtagatgagaaagaatataactaatatgaaagacaataaatatattagaaaatgaaattatattcttaatcatttattgttaacataagatataaaattgatttaatggttgggaatgaagaatagaagggagagatctcatatttaaatttcttcacctgatatttttgataaaaactaataaactaattaataaaaaattatttatcacgaatacaaggattttaaaatctaaaaaattgtataagaattttttgaaatctaaaatattgaatatatttcttatcaccttaaatgtcaaattcaaaggaaagcattggatctaattaagaatttgggacaatcttgaaagttaccaataatggaacttgaaatattttggtgtttgcacatacgcaagatcagctcaagttctttagagggagagaggcataaagagttggcgtgtgaagagaatctaggagtctggcacgtgtgaatgagcatgtggttacaaataaatataggagggacgaatacgataggtcatgctccaatgtagtgaatagctacaactacatgaaaatggatatatatacaaattacaaagtgcccaaactccaacttctgctgggaaatgggaatagccctggggccgttttttctctatctgctcatttagttaggtcacttcatttatacattttctatggctcatgattttcataaacattatgtgtgactcgatcaaaagaatttctctcatatatctattcctaacggcctgagtctaattacataggattgatgataaaataattggacaagagatacgtgcattttaatactttcttgaaactttaaaattaataatttcccttcataaatatttggactataaaagatatagtgcatttaattgatagtacaaaaaccaatccaattctgattcaggaagaaaaaaaaaggagcaaacaagcatgaaaaaactttagaagtttctgtttaaaatcttagttaaattattattattattatcatggtaacaaagataagtgatagaaacacattttttgacatactccttcaatcacattctctttaattaattaaaaatttgttaaaaattatgaaattataagaaaaaatcattaatataacatgaaactcacaaaattaattttttttatttttaataaattttaattaataagagggagtatgtttgtagtatttctcatctataaaataaagagagagagatgacgatgatctttaaaagttgaagaatgtacaaaacattaactatttatgaattcattatttagtggattaaaggtgataattatcgacataataataagatcctcattcctcacgcagccaaggaagtgggaactagtcccgtccagttatcaaaatgaaaattttgatagtattttgattggttgcaaattagattaatgagttgacacgtctccagttttacattgaattgttagagatttcttaacaagcttgaagatcccaagagatacacaacaaaaacaaactagacgatcccaaaatcatgattttattacattctttgacgtgaaactctcaattttataccttaaagtagagtggtggtccaagaggaggataaaagttttattccttctgttctattatatggttgttgtataagaaaaaaaaaattaaaataataattattttaattttttaatgtaatattaataactttttatttatttatatagtaatgatgaactataaaatttaaaaatgaattaatgatgaaataaagttaattttataaaattattattatcttttatttttatgtaaaaccacacaaaattataattattttgggacggaaggtgtatttgttgacgatataagctgttgaattagagttactttggagttttatatatacacttgcaatatgtgtttttaaattttatccatcatgcattttaaaatattcttgaatcgattgattttaggtcttgaagggtgtggcgcttggcgtaagtgattacttgttttaatgaattttgataaaattaagtttaaactaatgaacgtgattgaattatatgttcaaattaacctcgatcacaattttatatattatgtgaatctggtgttaaccaagcccgcaacaaaaaactcgaaaacatactttttcacttttattaccccttccctttgtgtgtgtttatttattttaaattttcatgatattaatctaaactaatgaacctgatttaagatatttgttcaaattaattttaattttagtattacaatacttgaaattaattctatgttctaaccaaacaagcaggaacaaagtgacaaaccttgcactttgaagacctgtgttcgcggtctgtgtgcaggttttggttggagttttgttcagtttaactatctcatattactttacaatacaaaagaatgcttatttattctttcaaattcagtaaaaagaaaaataagcaagctgtaattcaaagtttagtagtagctttcttttttttttagtgattatgatattgacgtggaatatttaatgaataatctttgttaaaaaactttatttattatctttaataaaaaaaaatcacaattacattcttttcgtttataaaatttgaacttaaagattaagtaattgaatcaagtctactcacaccaatgatttgttactaatagtagctttagtaaaattttcgttcgttttaaattttgatacaattttctactccatactaaatatgcacattttaataatcttacctataaattctacattcaaacatttattgaagtaagtgaaatgaattataaatactaaccaaacaatcaataaataaatttgtctttgttttggcgtgaatttttcgttttcaaccttagacaacaggacacacacacaacatggcgtggaaatggtaaactattatctttcattcattttaaggggaaaggctgaaaactgtcttatttcatagtcaattaccatcagtcttcctgtcggccagtttcgatattcaaacgtccaagtctgaaattcatgacattatttacacatggattgaaatcacttctcccattaaacttgtgtctcattttccttcttttttttttatccaaatgaaaaacgacaaattattaaaaagaggataacattccctttctgaattaataattgctagtctttatgagatgttattttttaattaaagggacaaaaaatagacggatgatttgagtcacacacacatacctcttctgtctatgatctttgctatttttaatataaagtagttttgtggagcgtggacatacaatgtatgcatacatctatgcaagttgagtgagaactatatataatcactccaatacctataaaacttcatcaataatttctctctctaactagttttaaagaatgaagagaagatcttcttcgtttcataattctggggcaattattttgttttctttttaaggtaagataagttgtggatcccattttcactgactagattggattgatcatacttttggaatgcgaagcactcatgattcaatacagtgtacgtgctataattgatcgatcaccgaggaagtcatcttgcaattattctttctttgggatagggcagcaaaactcttgtccaagttaccttcacccaacacccgtacccgtacagtttttctctttttctcccctaaggaagaccataaaatatctaggacaaaggaaaatcaataacaacaataacatttgatcatatcaatatttatgcatattttcattatccaaaccgaaagaaaaaatacaaacttttttatttagacgagacgattaagcaaaagctaaaacattagagagatctctttattaataataagtcaaacaatagctacataagtaaattattaggttgggagatggattaggcaagaattgcataagtgaatgaaacactacaacatggaaaatgttgtataattttcaaccattattattcgatggtgacataagaaaagagtctaaaacaccaaagggggatatttaataccgggccaagtgacaaaaaacatatgagctatcatattacatccaaactctttacgaatattaagtgtatggatttttgtcatatatacaccagttaacttattcatttttatctaatgcaagactcgttcctcacgctggaacaatccaacacttttactgctactactacacatgacacaaagcatcatggtatggccaatggggcagaagacagagggtggcagcgagtccccagtgaatgctaactatcgatctagggatccggtgaaggaaaggcaacgggaagatgcatggacttataagtaggtgtttgattttttatggaaggtcttctaattatcaaattcttacttctcacaaaacttacattcaaatatgtataagtttaatttaatataatacatccttgattattgaattcctaaatcagaatcagttcacctagaattattttaattttgagtttaatcataatatttcaaaaagaaaattttattatttattatataatcttatttaattcaaacgaaattatttatactagaggtacaaagaaaagaaagatccagggacataggtacaggccataaggaatatggcagggtattgtgattcttcttctcttaccccaaatccaagtgtatataccccacgccgtcactcggggccacaatgagccagaacatatcatgtgccacagacccatattacatgtgaaagtgtccacggtggattgggtacgtagttgaagttcaagttacaatgcaatgaaacttgggttttggcggcatttagttcggttctggataaatatgcgtggatcttggatcatggttgtctctccttcttcacttttaaacgtgtttttgggctgaggattccgtgtcacaggatgccacagacacacatacatacacacgcacacagattgaggaatgtatagtccccttttctcttttaatcagtaaagattgtggaaaaatagataaataaagtttgtggactcctttcctttgccatatgacggatgtacagtgaatctcctttaccagaagcctgattcatccagctcaaaagtatactacctttttttaaaaaaaaaaataaattataaaaacaatagcaattggcaagtttatatatatatatatatataagtaatatcacgttggttttgatgataacaagtaacaagtatattgattctaaatgaatcataaaaaatattttatttattatgtaaatcataaaaaaatatgatattagaataaaaaatttatgtgaaaaattatatagggatggaatgtttttataaaaatatgttaatatttaaattatatgaataaaattgattcttattcttataaacaatcaaaataatttccattttaaaatacacatttattatataaatatatagctattccatttttacatttcaattttttacttaaaaaatgagacttgcatttgataattttatatattgcccatgatattaaatattatattttcttgatgcttatcattctcattatcttaattcaatattattttcatgcatattattaagaaatatttcatgaattaattatataagtaacacaatatatcttataaaagaattaccatatataatttgactccgtacaacgcagggggcacacatgctacttgctggtatgttaaaacaaatttccacttttagttttgaaaacattaatgctacttagtcgttttttaatagaattttaatgtataaaacaatttacaattatagatttataaaattattaaaaccatatatttaattcaaaggtatacattatttaaaaattaaaaaaatccttaattttatcaaaaaatattcttagcaagtacaataatacagcaaataaatccttaatttcatcaacaaaacttctcactaagtactataatttttgtggtactaccatagttccattattgttgaatttggtatctagtgtgctcgaaggccgctagtttccaatggatatggtcccttctaaaaaatagttcgggaccttaacttttttgtactaagaaaaccacaaaaatttctctgcaaattaacggtaacatcacagatatcagatctctaagctgttcagctcaataattcctcttccgtgacatcaaatcagacaagaggcaatgaaacgaagcagagaggtgtatgtgcgtcgttgaagtgttatcctcatgccaatccttttctgacaacatttgtgtacgcgtgcttacctgaatcaccacacacaagtttggaacatcacatagttctccaaacattgtgctaccaatcgtacttgtataaattaggatgacattactactgttaatttttcggcagagaaagttgatccacgaaaaatcattatgccaggccatttagctgtgccaaccacaagatgcaatgtttcatcaacctaagttcgttgcactttactgattttttttattctagttttggcagtatggcatcgcggtggggttgccatgtcatgtatctgttttacttatcatatcaaatagtttcttgttctattttcttctttcagtttcagtaaaaaaaaaaaaaaaccatcttatttttaatgtttcttatttttaaatatttgtgtataaaccagagaaaccaaaaatattttttatttcctacatgtaaattttttgaagataattttatctaagatacggtcacatattaaatgtgagtatttctgttaatagtgattcaatttgtaccttcttcctcaagttacagaaagttagaaactaatcaatcgtgggctttgtaggcctaatgagttgtatatgggccagaatcctttttggtccaagcccacaaaaaaaacagaaatgggccaaaataaagttggaagattaaagaataagaaacacaggaatgcaaggaaagtgtagtgatggagagagagagcgaaaaggcgaaaccgcacttgatcttcgcgtacggcacgttgaagcgaggctttccgaaccactatctgatggaggagttgaggagcaaagacgacgccgttttgcttggcagctacgtgacgaacgagccttatccgctggtgtgtgggccccacgggatcccatacctgatcaaactacccgggtcggggcatcgcgtgaagggcgaggtctatgccgtgtcggaggaggcggtggttgtgctggacgagttcgaaggcgtgagcgcggggtattacgagcggttagcggtgacggcggcggaggaggagggaggggggaaggtggaggcggaggcgtattggggacacaggagattcggtgaagtgttgtggaagatgaagggggaagttgggttgagggagtatggggagaaagaagcaagagagtatgtgaggaaggaggacagaagcggtggcagaaacactattcttgaccttgttccttaaacctgtgttctgtcgctgctgaattttcatcgcatttaaggaaagtcttcagcctaatattatttgtaatttttcaataaataaatatgtttgttattgtatcctctgggacggatcgtattccgatcattctccggataatacagtttaatctatgcacacctagtgctgaaacctaaagaattcgatgtattcggtccaattcaattaatgttaagtgatttgtgtttaatcacaattaatgggatttgtaacctctgaatctttaacgaaaagtaaattcaatgcttgatagcatcggtattattagattttgggcttttggctggtcgttagttctaatggattactagccaggctatttagatgaatcagtgagttagtattagatgaacagtatgaactaatatttatgttaaatatataaaaatatttactcaatttttttatatataatatactatttgtgatattttatctacatgaaatgtcactagctagcatgatggcgtaaacgtttataccaccaattacaaaaaaaaaaaaaaaaatcatatgcgtcttagagtagataatattaatcgccatgaagctaacttgaaacgacgctagccaatttgaaaagacaaaaaaaacaaaaatcttcacatgcctttgaacttggaatctacatggcgggtttaaattacttgatttatgcaacaattttttcccttcgtatcataaaaattaaattataattttgttctcttaattttttaaattcataattttataaatttatgattttatcctccgacatattattaataaataattttaatttatagtatcattacattagaattaataatcttttattaaattttttaatgattaatagtttctaattaatttaataactctactaattataattattaattaataatcaatcacagaatttaaattactaatttataaaaaataaaaatacatgaatttaaaaaattaagttgaatctattataaaataacaaaaattttgaattatgaatggagtaatgaatatactccaataaaaaacaaatggagcatattattaagcaataattactaatactgataagcaattaagtacaaactaatactgatcaagcataatagtcatggcagtcccttcatttcctttattactgatcacacattatactgaagatggttcactcacttcttccatacaacttatgttacaaacatgtatcaaagtggaagtaaaccaaccatcatagtatatatatcatacatacacttgaccacacatactactgatcataattgtccccttcttcaatacaattaattttacaaacctgtagcagaatcaagagaaaaataaccatcagattatatcatagatgcactcatcgtttatcttaggtggatttgtcatcaatagtacaagaacactgtccagcgcattcagcaaagcccttgccagagcctgcatcagggccttcagtcctgaaaatgacacaactccacccttcaccacacttgcagaatgctccactgccactgctgctcacaacatcaggtggcaaattcaattcttgggacactgcttcgccctcactgcacaagaatttgggaacagaacggtgttcagtacattgcaagttgcaacacataattagatgcagcagcagcggtatattattttaaacaaagagttactacgttggagtattggaaaggacaaacaactgaaaagaagaacaaataaaattgacaattcattctagagtagctatgacttatgaacaaattcaaataatcaatagttaatttatatatggaataaaagtatcttagaaaagaggtgtgttagacgtacatggtacaggtgcaattttcaccacatttaacgaaaactttgccagcatcaggcccctcagttttagttatgatgcatgtccaaccttcacccatcttgcagaatgcgctgcccttggccatgtccaagcccaaggttttatctgcttctgggacttccctgcagaaatagttgctaagcttaggggataatttttctggacgattttattctatggaattaatcttcatcattcatttacttggaatataataaatgacgaagagaagtaactccaaaacaattactttttagagacaattgatgtctcctctcatattatatatataagctcgcagtatatatctatgatatgtatcatggaagtttgaagatgaaacaacaatatcggcaacacaagttattgaaattaattaaagaaaaatacatggatgaaataaaaggtgaaatataggatcgatggtaacaaaaaatgcaatcagaattataggaaacctgagattgagagactccttctctcgtgtggaagtctgggactccatattctgtaaatgataagaatttaatttttttgttgctcatcatcattttgtgttatactaagtattatatgtatgaggaattactgagggaacgaggtagaacattagaaagtcaaaagtattctccacaatcaataattgaagcatgtttaaggttgggcattgctgtccttaaacacttacattacaaaatatctacattccagtctccatcatttaaaaagcagcctccaatttgtgaaccctatctgtattagaaaagaacaaaaatgatactattagttatatatattttacattattaaatgaattattgaattttatgtaagttttattaaggtatccagcggcatccatttctccgaggctatctgttactagggaaaagaattaaaataatgcaagctgtattttttttaatatattttgcatttgaatgaattttatataatttttattaaaaatatccccggcattccattctgcaaatcctttttgactcacctttttagaaagaaaaaaacgaaaacaaggggggacacctgaaaacattatggaatgtgtgactgttttaaattttgtttgttttttaaatgaaaatctatctcctcggggtttggggttcaggcagaaaaatgggcctagaagatccaatgcccacagcccatttgtaagttagaatgcgggctcgaaggacacgtaggcccaaaagctacgactcccttccacccttagtaatagcacattagtattaatcatcatgcggatttgaatccttctctccaatatgcatatcctgcccttccatttctgtttgaaaatatcaaattattcttttattattataaaacatttattttaaaagttattttttattgttataaaatacttattctgaaagttattttttattattatggaacacttatttaaaaagacatgattattttttattgtcatggaacacttattctgaaaactatttttacttattttgaaagttattttttttacttttatgaaatatcttttttggaaactattttttattattataaaatacttattcaaattatttttttattactatgaaatatctattctggaatatgaaaagaataatttgagattttaaaaaatttgagagatgcaagattcaaattccatcatcatgtctacacattgagaaaattttagaaacctatataacaatcaagatattgaactaaaatttgatcacttaaagccataatcaactctcactatttaatttaattttaaacttggcacttgtttagttagttttgcttcccaaagttacacaatctcaaaaaatttgtccccaaatatttttttcactcattttgcctcccccattaacaaaatgccatgaattgtatccttctgcctactcacctttaattattctcaagggttatgtcaatttagattttgcatgttgtcttataaaaaaaaaatctactatgtatgtttacatttgcaggagaggtggtaagctagctattcaaattaaagactattgtgactttatctactacaaaagatgaatgtgtggtagctactccagtatgcaagttatttggattcgaaggttaatgaatgagtattggcacaaacaacaaaaggtttttatgtattgtgacaatcaaagtattttgcacactacaaagacttcagtcttttatttcaagacaagacacatacatgttcaatatcactatgtcaaaaatgaagtataggaaagaatagacatgcaaaaaaatcacaccaaagataaccaacatatgttatcacaaagttaaacaatacaaacaagtttttaaggtgttgatcctctatggcctataaaagatgtaagcaacaaagaattgacaaggtagacaaatatttgaaagggcataaaagtagctttaagtgaaagattgtaattccacaaaatagtaaaaccactattgtggtagaaaagttgaaaaaaaatgttaaaactttgactagaaatatgttgggcttgtaaattggttggaaggctaaaatttttcaatggcattcaatgtttaaactcaaatctttgactagaaataacaattcattttatcagctttagcatcccatccaagagaaaaaaaaatatatatgacagatctctaagtgtttacctatttcatagatagaagtgtattctcttaataagagaaagtataattgttctctagcaacatttagagagatgaaattttttcttctacttagtaaaaacatttatctagtcttgtttatagtttttcctaatcaattgaaagcttcacattaaaatattgtgcttcagtttgtaattttttcagctccaattttaattgtaagatattattttgtcactttgatgttcaagtcaagaataacattagtattatcatttgagaaaatattatatgtacaataatattttttttgtttatcgatctctctcatgtacatcaattattatacgtcacaatgataaagcaagatatagaaaaaaaaaatattgtataaattttatgtatatcacatctttaactataaagagagcactcaacaatgcttatcaaacaagtagtccatgttccactaaatatatattagctacttcgaaacattatatgggttcataatttaattactttgatttaattaataaaataaacctcagtgcttacttatgctagcttgttcttcttgtttattttacatggtaactcatctctgatgaagtagtgggcaacatatattgctgtcagagtcaaacatttctgctcacaagacaagggtggagggcaaaagggcaatccactagacaagcagaaggagatgggtggatcccatcccgcaatcttcgaactttcatgtgatcgtccactatatatcatactttcaatgtcatgtacgggaattaaagtagcttccaattccatattcttaatgttagtgatacatagctgaagtaaggtaaaggtaagttccttcaatttgaagcaacaacttgacgcttgagactatggtcttgctcttgcatgtgcaccttcccattcatttgcactattgcgcctccttctaacaaaactcttatctcccaagtcacacatacccacatacatatatagggtcttcttacgcgattaatgtgaatacgaaatgataattttatgtgctttctttcatatactactctttatgttttcttcatgatagtaatttgaatattgtatttctatagttaacaatccgatcgagttgaaagtaaaaatttactataatgctccttactatttaagaaagagtagctcgttaatctttcgatggaaatcacttaattaatctattgccaaaattatgaaggagtggaataagtggccgcacaaatatgagggccttttcgctttttatgctagtttgaagttaagacaaacaaaagaacgcaaacaaaaatgtattgaaaagtatcagaacataagctacagtatacagtggatgagatacaaagcacttcataagaaaaatgcatttttttcgttcactacaaaaaaaaaaatacttattaacaatttaatattaaattaaccttcattggtagtatgatttttctctttagaagtataaactatacatataggtagccttatcaatcttatacaatattatttaaagaatgaaataaatataatgaaataaaaatttcattctatcatttgggtagtgaatatataaaatagaattagttctcacttttattttaatattatccttactagccccaaacctaacattaagccttcaagcacaacccaaagttctgttatataggctatattagagccaagacgcttaatatcccaaaaatttgatgtataacaaagcattaaagacttaacatgatttttttcatccaaaagtttttgtgtgctttaagtgtacatcccactattagacttacaaaaataagattgagtatataagaaacatacaaaaaggttttcaaaccaaacatctcaaatgaagattcttgaataatacataacatctacaaattgatagataaaatacataaacctctatgaagataaacgaacaagcttgacaaaggtcttgaaaattgtgttgttattttagagtatttcaaaagcttccatattccacattgcttggtttagccggcctatcttcaagtgtttatatcaaatgttttaaggggcagataaaataagaaatagaagtgggttcacatgtggacatgataaagataatataatgcaaattgtttgattcaccctgaaataatgggtatttattagcattaatatacatatccaaaagagtaatgataacaccttatatcctaagcatatatttatatatttggcatcttttttttctctctttttttttatcaaattatatcacctagtatttacacttgaatctcttttctatctctttcacaagttgtcaaataacataagagggacacacatctttaaaaaaacatcaagctttatctcaaatgacaaaaagcatgtcaagtgatataaatacttaaacttgaagaattaaagagactgaatcacttatttttcttttatccttaatttgaaagggcgcactcatctagttgagaaacattcttttttttcagccaaaaaggataatattgttaatggctaccagaagtacctgaggcagttacatgatactgagagttagataattaagtcccccatgcattgatatattccctgtatatagcatccctgtgttgttgatctatgagaagcattcttaacaatcattaactatcaccgagtattataaagtaactcttcacaaacgtctctttcaaagtaattattgtcaataattttaattataatacaaagtataataattaaataatagtattaaaaaaagtttacactattaatatattataattaaattcttgttgcatctcattctactcattcagacataacataatgttccaaattcggcacattactatatcgtagatttgtagctcaaaaacaatataaatttggtacaattaatagtcagtatcacaatttatgaaacaaaacaagtacaataattcttccagcggctttagattcacttttaaatcaattcccacatgcatgttgccactgattcggactcattcacacaatcatatatacggtaaccttctgttgtatgaaccacacagcacaacaatcatgtgatatcactaaagaaggcttaaaatataaacaaacaaaagtttctaaaagcataaatcatagaaatccaattggtggatcaggataaatacatacagatcatgaacaagctagttgctaattacagctgctgaaatttgaaagaaaaattaaatagttacacttgccaatggtgctaaatgtgaagttgtgaacaacatagatgaatgacttagacatccataagagaaaacggatatgtcatatgtgtcttataacaacgtgagaacaagatcaaggaaggtgtataatggttgacagcaaaagcacaccagtgggtctaatagtgcgcttttctcagtttctttctgaacttgtaccggaccaacttctgcatgtgcagtgggccacactgaacacgctttaaggcccctccaatagcctaatgggccaggcccattcctatatatacacacatgcgctttccattctaaaaccacacactttgcaatggcaactacttctaaggtgattctgagtaacgttctctttgtcttacatctttagtatttgctctgctgctagacactcnnnnnnnnnnnnnnnnnnnnnnnnnnnnnnnnnnnnnnnnnnnnnnnnnnnnnnnnnnnnnnnnnnnnnnnnnnnnnnnnnnnnnnnnnnnnnnnnnnnnnnnnnnnnnnnnnnnnnnnnnnnnnnnnnnnnnnnnnnnnnnnnnnnnnnnnnnnnnnnnnnnnnnnnnnnnnnnnnnnnnnnnnnnnnnnnnnnnnnnnnnnnnnnnnnnnnnnnnnnnnnnnnnnnnnnnnnnnnnnnnnnnnnnnnnnnnnnnnnnnnnnnnnnnnnnnnnnnnnnnnnnnnnnnnnnnnnnnnnnnnnnnnnnnnnnnnnnnnnnnnnnnnnnnnnnnnnnnnnnnnnnnnnnnnnnnnnnnnnnnnnnnnnnnnnnnnnnnnnnnnnnnnnnnnnnnnnnnnnnnnnnnnnnnnnnnnnnnnnnnnnnnnnnnnnnnnnnnnnnnnnnnnnnnnnnnnnnnnnnnnnnnnnnnnnnnnnnnnnnnnnnnnnnnnnnnnnnnnnnnnnnnnnnnnnnnnnnnnnnnnnnnnnnnnnnnnnnnnnnnnnnnnnnnnnnnnnnnnnnnnnnnnnnnnnnnnnnnnnnnnnnnnnnnnnnnnnnnnnnnnnnnnnnnnnnnnnnnnnnnnnnnnnnnnnnnnnnnnnnnnnnnnnnnnnnnnnnnnnnnnnnnnnnnnnnnnnnnnnnnnnnnnnnnnnnnnnnnnnnnnnnnnnnnnnnnnnnnnnnnnnnnnnnnnnnnnnnnnnnnnnnnnnnnnnnnnnnnnnnnnnnnnnnnnnnnnnnnnnnnnnnnnnnnnnnnnnnnnnnnnnnnnnnnnnnnnnnnnnnnnnnnnnnnnnnnnnnnnnnnnnnnnnnnnnnnnnnnnnnnnnnnnnnnnnnnnnnnnnnnnnnnnnnnnnnnnnnnnnnnnnnnnnnnnnnnnnnnnnnnnnnnnnnnnnnnnnnnnnnnnnnnnnnnnnnnnnnnnnnnnnnnnnnnnnnnnnnnnnnnnnnnnnnnnnnnnnnnnnnnnnnnnnnnnnnnnnnnnnnnnnnnnnnnnnnnnnnnnnnnnnnnnnnnnnnnnnnnnnnnnnnnnnnnnnnnnnnnnnnnnnnnnnnnnnnnnnnnnnnnnnnnnnnnnnnnnnnnnnnnnnnnnnnnnnnnnnnnnnnnnnnnnnnnnnnnnnnnnnnnnnnnnnnnnnnnnnnnnnnnnnnnnnnnnnnnnnnnnnnnnnnnnnnnnnnnnnnnnnnnnnnnnnnnnnnnnnnnnnnnnnnnnnnnnnnnnnnnnnnnnnnnnnnnnnnnnnnnnnnnnnnnnnnnnnnnnnnnnnnnnnnnnnnnnnnnnnnnnnnnnnnnnnnnnnnnnnnnnnnnnnnnnnnnnnnnnnnnnnnnnnnnnnnnnnnnnnnnnnnnnnnnnnnnnnnnnnnnnnnnnnnnnnnnnnnnnnnnnnnnnnnnnnnnnnnnnnnnnnnnnnnnnnnnnnnnnnnnnnnnnnnnnnnnnnnnnnnnnnnnnnnnnnnnnnnnnnnnnnnnnnnnnnnnnnnnnnnnnnnnnnnnnnnnnnnnnnnnnnnnnnnnnnnnnnnnnnnnnnnnnnnnnnnnnnnnnnnnnnnnnnnnnnnnnnnnnnnnnnnnnnnnnnnnnnnnnnnnnnnnnnnnnnnnnnnnnnnnnnnnnnnnnnnnnnnnnnnnnnnnnnnnnnnnnnnnnnnnnnnnnnnnnnnnnnnnnnnnnnnnnnnnnnnnnnnnnnnnnnnnnnnnnnnnnnnnnnnnnnnnnnnnnnnnnnnnnnnnnnnnnnnnnnnnnnnnnnnnnnnnnnnnnnnnnnnnnnnnnnnnnnnnnnnnnnnnnnnnnnnnnnnnnnnnnnnnagtggaggagctggtgatggtggtggtcaggaggagagcatgtggtggttatggtggtggcaaggaggtggggttggagcaggtggagggtatggtgatggtggagcacatggaggtggttatggtggcggccaaggaggtggagcaggtggagggtatggtgctggtggggagcatggtggtggatatggcggtggtgaaggaggtggagcaggtggagggtatggtgcaagtggagaacatggtggtggttatggtggtggtcaaggaggaggaagtggaggagggtatggtgctggtggagatcatggtgctgctggctatggtggtggagctggaggtggagctggtggaggctatggtgccggtggagaacatggcattggctatggaggaggtggtggaagtggtggagggagtggaggaggttatggtgatggaggagctcatggaggtggatacggtggcggcgcgggtgccggtggaggaggagggtatggggctggtggagcacatggtggtggttttggaggaggtggtggaagtggtggtggccatggtggctatgttccctaagaactactcttcaatgcacaatagatgtgcaagtgtcccctttcgcgtatcaagaataataagtatgctattaataacaggatcataataattaataacgtaacaatcatatcatcaccattaattctaagcacgttgttatcaactcgtgatttttatgtaacaaaagtatttccataattattatttgcattatcgtgaaactactatcatcttgtaattgctcttctgattatatatatttgcataaaagaaatatgtttagagtttgagaaactctttctgcctctctttggtgtaatcaaacttgaatttttagaaagaaaaaaaaaaaaagatttgttgacactaatttctagtcagtactgactactgaacccgaatgttcttccgccaaatcactctacctattatcatcttagtcatttgttggtcattctatagaaattaagaaaagagtgaacacaacgaatggttctgtttagaaaagggttattaaacttattcaaactaaaaattgggttcaacaattcattacggtataaatcattggtctgattattaccaattatttttaagtagagaattatactaattatctattttgggttgtttaatttaattttcatttggaataagttagacagtttcatggagaggaaaaaaatgatggagaattaattcacaacagagagaagagaaagaaaaaattatcgctccgactacaagtactgtcacaaacagatataattggtaatataaagaaatagaaagagaaaaatagaaaaaaataataataagtattaatagagtgtacgataagtgaaaatgatcataaatctttgttccggcttttaacctaaaaaataattgtaccaagattcttaaatttctcttaataacataacaacactttattttcatagacatacattgcgattattggtatgtctaaaattcaatatatgatgtaattaatgctaatttcaaaaaaagtattgttattttttatcatttttttaaccgtttgataaaaatagtagacttaataaggtcattgattaaaattaaagatttattatcataataaaaattatgaaaatgagacataagtatcttataattttaatataaattattcttgattataacattattgtgaataggacattaataatttaaatagattaatatatatgtaatgtctttattggataaagattaatatattttatttattaaattgtatatataaatgatgtacatgtgaatattaccattgactcaattctcaattgaaaatttctaatagttaatattaccttgatatgttaataaggagttctcaggacaaaatataataagttagtttgacatgagaatatcatagtaattaacaagttatttgttatattttaatttcagacacctaatattttagacactagttgaatgaatattgaatatgattaaatacttgcaaaactaatgattaatcaagaaggaatctatcaattctaaacaatgagtttgagttttactgtagaatcaagacattggtaagggcaattaaatgaaagaagaaaagagtttttgaaatcattcattgattaaatataatgtgttaaaagtgagtaatatcatattctagagttaaccttgagttctaaacaatgcaagaaaatgttatattattctttcattggttcttaagagtaaaaaatgttatttcatgttatccaaatgctaagaattgttgctagatgcctatcctaattagtaaattaattatgattaattactatcagtttagtattgaacgagcagtcacacacaaatgaatgttacaatctttgcaacaaaaaaaaagataatttatttgataattaaattagagaatttagtttaatcaaataaatgttttagtaaaatattattatattatttgctagcactaagaatattattaatataaacaaaaaatattatgttataaatgtgaaagttttccataaaataagattatattattacacatcagattatttattgtaactagtcatgtaactatttgagaattatctttgtctataataggaagctttttaagataaaaagataggagataatttttatttttcaaatataaaaataaagagatataaaattattttaaataaaatctctcctttttaaaaaagacttaaattcatatttatttatagttatgaatagaaacatataactgagaacaaaatgtactagacacaatctgaaaaagttcaagaaaatttactctttagaatttcacttattaaaaaattaataacaaaaattagtctaattcttgtggtgtgggtatatgtagagtagaaaatttttcttacttcaaaaatgtatatccgtatatacaaatctattttttttctatttattattattgtatattttttaatgtaaaataaatcataattttctagtacaagtattaaaaacacttttatgtaactattaattattgtgattgttaaaattcttaagattttaatcaattaaaaatgatattaacatcacttttaaaataattattataaaatcaaataatcttatgatatatgcatcataatttatgattaacaatgtaaatgtgtaaaagacttacgctttcatgacatatatctgaaaatagtatccgatggaacactctgctcattatttctgtcggtttaggttctaacacccttgaccggtaattgtcaagcctctggtggtgtatataatctgtgcgtaactagtgctttcctaacgaacaaagtgctgtttttgtcatccaatatattctcctcacttattagtatcctttgattcctctgaaactgtcatttgaggcttagacagtgccaattctgcagaaatgctttcgccgttatgactcatctgcctgcttttgatcatgtcaacccttccatcatcattcatcatgaaaatgttgcatggtatctttttggcatagaaatctttgttccttttatgagatctgttccatataccattttttcatgaattacaatcctcctcatcaccaaacatgaaataactaacagtaacatttcattcaaaaagactacacaacattaaatggttcctggggagataattttccatgattccttcattgaaccagttcttacctcgcctttatttacattgacagtagctgttaaacgtgtcatttatcgagggaagttattgtgttttaaatttaataactattgctattattcgtaaaaggaaacttagttatgattctcttgaatttaaacccattggatttgataaagggtttaataggcaagcacaaatcaattaaaaaaaatagtatagatattatttttaagatagtatttataaaaattagcaaacttttgaataaatgttaacacactaatcatatatgaggatttgtaacaagatctattagtacatatattatttattctttcagaaatgcggcaagctattttcttctgttcacaattatatggctactttatttattgctatcactaaacctgatcgggacctatcagtttcaatttcataaactcgggttatgatgaaatacaaaaataattcccatgaatattgctaaagcagaaacagcacaaagtcaagtaaataccactcacgtggaatgttaagccatggcatgactccaagaagagtgaggatgcagccagcagtaacgacattatcaagcgcccattgaagagtatctttggtgaactctgtcatcccatccatcacaaccacaacatgtttgttagtatttcctgggctagaaaagtcaagatcaggaagatcattgcaagtggcatgtccattgctcaggattgtacgattagaagacaaagatggtttagtttgaaccattaaaaaccaaaccgggaaagggatttgttgcaggcatagtaacaacttatatagttcatatttcccgtgctcggcaatcaagacaagcgctttacatgatcaagagctacttagttattgacgtttttcaaagttacattaattaaagaatatttgcttagtagttgccaccctcagacatgaacaacacttgaacttggacaagtgcttaaatgacttgctaagtaggtataactagaaacttttatacaaacacctacgcaaaccggaaagttgggccgagaaatcgaatactactggctttttccgatataatcaatgttaagatgttcagaaccactaggatcgtcttatttatcaatgtaattgtttttacatccttgtcctcactggctatgttctacctgtgcagaagggggaacatatccagacacccatttcatccatgcatcactcgctcgggtgtgaaactatacaattcggtggtgagtactaggtattgacaaattaaaaaaagagagagagagagagaaaagataacggctgtaggcttttcgccaaaagaactcaagtacatcaccaaacaaccaaaaaatattcaccgtgaacttcctgcggccacagggggggtgacagatgtatggcttggttttttggtgcttttcttacactgcaatgaatccatattttttctcttcttgtccaaaactttgtttggagtaacaaatttcaaaagtgcccctctccttgaacgattcttgcaaagatatttcacagcttctcgtctttcttcagaatccccagttaacttatttgatgatcttttacagctccgatgattctctctcttcaaattatcacatgagatgtggaacttatctgagaaatccaactcaagctcattaaacaaacaagtaattcataaaagtaatgctgacaaaaaaggacatttagcaaaagtatattcaactacctggagcatcatcaggaggcaagctaggcagagttaaagaatggaaaccggccttctctaaaaaatcaacagcttcctgaaaggtattgtcattatcaagactaccgttctcaatatatgaattcccaatgtcaaacatggcactatcatccaaggtggtccagttcctaaacagctgttgggcatcaacgttttttgagctattcaaaccaacactttcctgatttaacccagagagcaattgtccgcagccatgagtagcaactttatgtccccccctactactaaacagcttttgggcatcaacatctttagaggtattcgaataaaaaatttcctgatttgatccagagagcaattgtccagagccatgagtcacatcttcagtgtcatttatttcaagaaaaccatgatcttcttgacaataataatcaaactgaggctcagaatactctttggattcttcagccacacttctttcaatatttggaagtaaaataggatttgatttagacatgttgtcaccaacgtctaaaacagacttaggagatgtactcataatatttggattcaaacattgtgttttctcttccataatactcaaaaaccatggagtaccctgtcgcgcataaaacaatatgtatgcttcctgagacagtactgtttctactgagacctcagtaacctgaagaaaaagtccccaaacattatatgtttagttttaaaacaaacattaaccaacacaataactaaaaaaaaagcacaaactatatgcaaaagaaacttcggaagcaaagaatttttttaaagttatggaagacctagggggctgaaaatgaggaaataagtaaaatcttgccatgatttcaaccatagaaattccatatttttatataggtaataaggtacaatgaactaaaaacaaatggacaactgtttgataatcttttattgcaataatcatatcaaactgtagataactgtttattcaacatgtaaaaccaaaagcatgaacacttcaaacaaaaagagagatttgatacttaacacaattgccaattaattatcttgtacaatgaacaaaccctaggaagacactcaaaccttttattatcaaacatatcatgcaaaataattaagcacgtccagggggaaacaatgataccattgaatcatccaacttatgccatgtgtctggagctgagcgaacaaagcagaagtaatgccctgaagtagaagaaagtccagtatgcacaacaatggcatataaatcatatttcaatggtacctttcaaaataaaaatgagtcagaacacagaattcacgagggaaaaaaagaatactcaaaaactacccacacacaaagatctagtaaaatgtaaatgtagttataaaatcataactcacatcattttcagcccctgggtcttccataactttaatggtgtaaggctgcaagtctaactccaatgggaaatcaatatgcttatcaatcttttcaacaaggatcccatctgtcttaaatctctttaaatgaaatgcagcaactgatggtgtctgatccaacataagctgcttctccatggacacttcttccttgcagttatcacattgaaggttatcatcaatgttttccaccttagtaaaagattccagagcacttggaagagaatctacattatctatctctaaactcatatcaataagtggctcaaaagtgttggaagtgtggtcacaagtagaacattgaagctgaaacacaaaacacaatgagaacattattaattgaaaccaaaacacaaaaaccaggaaaagatagttattatcaaacacaacaatacaaatcataaagaagccaaaaaccaaattgtttaacaatgcacttcaccgccatactttgctaatgagacgacctccaaatactttctctacaagattaacatcttcaaaatttaaattactcttcttcaaacctaggaaacatctttccagtttatccaaggtacactgcataaattcatgggcatcttcctgctggtatcttctaaaatcagaagaaaaatctgtgatggttatggttatggatcacaacagccatccaaaaataaaaagaaagcaatcttgcaacatttatttaaaggttatttcatgagccaataatggaacaataatcatgaaagtctgcaagctagttaaacaataatcatgaaagtcgtaaaagaaggatacatttcaaattgttcacaaattccaagggtgaaaatgtccctcctgaagccgctaaggaacgttcaacatggatacgaagagcacaaatgacacagaacccatccttatgacctgaaattcccgattccaaaaatcaaaatcttcacaaaagaaaaaaaaatcataaaacacactcaaactataaacataattgcaaggagcaagcaacaggaaaagtgctgctttacaaatttcaatcccaaaaataatccaccctctaaatcagtcaatcacaaaaagtcaaataacaccggatcatcagtaaaccccaacaatactgcaaatcaccaataaactaaaactaaatacttgcaaacaacgccaaaattaaattcaaacaagcataactcaccagaacaagggataggatgagtgctggaacgaagaccctgcaccagaggcactgtatgcgtaaagcattgcagaatagcattgagaaagcaagtattgccaagattcacaagccctgctccctggtaaacaaaatacattatcaatttatcatcaatacaaaaattgagaggaaaaaaaaaaggaatcgaaacagaacaacgacaacatctaccatcttagaaggcacgacttcagaggcagattcagcattgtctgaaccttcattttcaggtaagagccaatttccttgtggagcaatccacgattccggcgccactgcggagacgcgcgaattcgaaaccaacgccgacgaccaaagcgaagacgagacgtcgtcgtcgagctgccggaactcggtagaaccgccgccgggcgggaacagagcgtaatcaccgcccaaatcggcgaccaattcggcggcacttagggtttcggaaagcagattcggcgcggggggagcatccattggctcctcggatgccatagctggtgaagagagtgagagacacatggaaattcgcgacgaggagtgtaaattagggttgaaaaattagagaagaaacggagttgaacgcttgaaataggaaaaaaaaatgagaaggaggaggattttgaatctgcgaatttcggagaaattttggatttttaaaagggagaaaacaaattggggaagggggtttgggaattagggtttagagaggaagaagaggaggagggaaggtgaaaagcgtttgaaatgagagggaaaaacaaaaaggggttttgatttggtgtttgggaggttttggcaccaaaatcattttcgcgaaagtggcatcgcgcgcgctctctgttactgtaccacagggtttgtttggtaccatcaccgcttcactttcagagttatttataagaaaataacctattaaatgctgtagataaaattattatcaaaaactgtagattttttttaaggataaagaatggtagataaaaatctcagcgggtttagctcaggttgcattaattattttaaaccttcacactgtttttaattcttacgaatgccgtcaaagaaatattaaatgcatttatcaaattactttaaaatgtccaattttttctatttttcaaatttaaaatatttttgataaaaaaaagtatatcaaattgcattaacaaccccaaaagattttttttaattacacataatccgaccaagaataaaataattaaaacttatgcaagtacaccaaaaaaaatatttattatcagtatgtataagtaaaataggtatcatgcattgataaagaaaacaacatacttaaagtaaaaaaaaaaattaaatttattttaagtgtcacttatcattgagtcggtcgtgattatacaatatttttttcttgtttaatatttataacaacctcctttacaagagatatgtcccaataatatataaaagatattaatagagatatgtcccaataatatataaaatatattaatgtaatatttttaaatattgacgagataatgtaatatacaacaaatatgtgtaatatttccaaacattaaagagaaatagtgtataaatagacaaaaagtattattatgcgtaattcgaaaaaaaaaatagaaatacaggcctaatttactcaaaattttattatgcaatcaaattttctatattagtattattattataataattgtttcttaaaataatagttaaataataaataaataagtttattacaaaatactattcaaatatggtaataatattaaattctatatgactttcaacaataatttatttcatatttagaagaaatttaacggcacgcgtttttcatgctaaggaattaaaatataaattaataaggttaaaattcaaagtatttaatttttaaaattattataaaatatttattattttccttttcaacaatataattgaaattccaaaagcaaccaagttaatgatatcactcaatagatgtatctgcttagttccttaaaattaatatggcatttaattttattatttttcatgtatctattttttttcattagatgttattgttttaattttttattcaaggctcaatattatttgtattgagtatttgaaaacaaataataaatgcaagatggtcctttgtatggaacatgattattttttttataataatcatactaaaatttgaacctataatctcatacatattacctcaaatctctaatcactagcagaccctagtggttctatggaacaaggatataccaaggaagcaacttgtcaaagctagcaccatgcttgcatagcaactcccattacagcaaagcagaaaatgttgcttctaaggcaaatgttggtctaaaggaatgttgcttaacaatcaaaattaaagaaaaaagtctaaaattattactataacgtgtaaatgtgtaaaaagcaatcaattctagttgttggagaatttttttagccgttagagtttttatcatataaatagagtgtaatgtaatttttttatacaactaaaattttgaaaaattttcttatttcagtctcaaagaattaacaattgttttaatttgttttcgaatccaaatcaaaattctcacaatatgaatatttgtgtgttgtgtatatttatatttgatttttaatttttaaataaaatataatttaattatgtttatatttgtatttttttaattttaaatttttttacatcggctaaaaatatctaacacaataatgcattaaaaatttcttatttttaaaagtttaattaatttgtaaataatataattataaaataataaaatagttattaataaaatataataaaaaaaattggtgggatccattgaaagcaacgaaaagaaagttgccccattatatagatttattgcacaaagttgtttatataacatcactgatcatccttccaatcctatgtagccatggattaatatatccattcaacaatgcaacaataaaaaaaaaaggttttaataaaagttaaccttaggggaatttctatgttacaaataaatactaaatcgaaacatattaaaaaaaattaaataaaatataaaacacagaaaacaatacattttcaattccccttagtgtgacatgcttgccaattgtagaaattgcgattcacgtacattatttgccaccgccaccacacttccaaatgtttcaccaaacaaaaacatctacctacattatttattaaaatatagttaatcaatgaaccaattccaccaacaagagttcaacttcataatcaacccttttagactctaaaggtttgacgccatgcatttgaaccaaaattttcaagttacataaagtataaaccaaagcacactaagtcctaataacatacgattgcgaacacatggaaagcatattacaatggagcataacttgcctaacaaactgagactacgatgtgcagcagaacaatcgatgcagaggaagaggcccaagttgggttctttgcattacaatcgaaacacatctgaaacaaaatacatgtagggttgtgaacctgaaacatgatattcttatcgttgaaggcatcaaaggccatgggaacgtgacaatcgaatgaaaaaaaatgggaatgaaaatgggtatttagaagggttgttaattatggaatgagttaattaggggttgagactttctcaggcaagggggtgtttgctcagtgtggtggcaacgccacaccatttctcttctcgagcaaaaataaccactaatcttttgttgttacttcttcccttttcttttttattcaaaacaaattgtatgtcctttcacgttttcttttagtgagaaaacggcgtggaacgtataagggaaggcctgagaaaaatgtgcatttgttaatgttatggttgagtttggttttctcagtgactcaatggattggttgatttgtgagattactgaaaatttgactaacttatttcaatgtcaaacactttcctttttaatcttaaaccttaatataatatttttatatatagtatttattgttgtatttagtgatatagtatttatagaacctcacaacttttagttcaactagtgagattattttatcaaatcaagtttcaatgtttttcacctactcattcgtatgtgtgtagtccaccaaaatcgtgaaatgttatttttatcgatgacggatctaaagggggacagatagttgtatttgttgtcatagtaatgattaaggtgataattagtctagaattgtggataactagttgtgtgtttgttggtattgtagatcaatcttgattattatcatttaaaataaaaaaatttaaattttatgttaaaataataaatattttttaaaatgattatttattagaaattagatatttaaagaattataaaggaaaaaatatgcgctcatttaatagatttttttatccatccctgattttcatataaatagatgaaaataagagtattttttgtttttatataaaaagatctattttcttcctttttttcataaaaaattggatggaacataatgaaggaacgattaaaaattattcttaaaatgaataatgtgagaaatttaactcaaccttaaaaattaggtgaagaggtgagaattgatttttatttatatattttaattttgttttgtttttatatattttcaataattatgggttttgttaatctttctctccaccttcctgtgaaagaaatgaaggttgtgcttatcaacaattttgataagttggtctataatgctgggcttcgtaaataacaaatgcaacttacccgaaattcaaaacgcagatagcttgtgataaagaaacaaaacattcaagggatatgtttataactttcattaggccctccttggcaagaacaagagctatgatgcttcacagaatcacaagcaaacgtttcaaagtttttatcaataagatatagagaatcttcggcatcaacttgccttaacaatttcctttgctgagatgagggtctatggggattattctcatccataaaacttttagttaacaaatacttttttagcccaacaagattaaaaatctaaattgaaccttatagttctcgatccaaactgaatcttctttgaataagatttcgtccacgtccaaatctcttgcagaaacctcttaaaatcttgggttagattgcgtcatatacaaaagcgtgcttattttgtcatgtgctgttttatgcactaacgtgttctcaactgagcttggccctctgatctactggcccttattgtaagaagagcgtggtctttagcttgttgtgcaaactagataggattcgttgaaataacatattttcctagttttattaatggaacaacaaattaatataagagtttaatatttatctgttcaatcataaattattatttaaattattttaaaatttaaaaaccttattatgcattatgagtgaagattcgatcataatatttaattcatttatgatattatatacaaaaatttggtccgcaaccctatcatacaaaaaaaaagagacatttatagctcgggactggcgatgcatggttctatttttattttttaattgtgacgataatgagtctttttagtttatttgaatgaagatattatctgttgccttttttttttttccttttcgttttgctactatactcagtaggttagtaattcctctactcaagataattatatatttttaactcataaataattatatatataatataaaatccaaaatatcttaattaaattatgtatagcctaaatcctgtacttatactaagatacgtctattaatgacagcaacatgaatccaatcaagcccagccacacaattcaaataataacttgcctcgtcctctatgacctagaaaagacacgctttacatttgcattgcatctaattaaatcacaattcacacccaccatattgataatgccatttgaatcaaatacgattgaaaaatgtcgttatcacttttgttaaatgttttaggtgatacatctgaatccaaatatccacagctgatgttgtatatttgtggtctacatgagatgctacaaatctttggtcctaatatttcatgttgagtaattttttcaaaaagaaaattgtcatggctaataaataaagtcaataacattgtcgttaatatatgcaatgtattctgtgattacacaaagaaaataaaactagctagtaatattagacttgaagctgcaatgcaatctcgcaaggaaagtaattttttctaagccataaagtagaagcataacttaatccatctctatgacattaattaatatgcacattgcatatcttcacgcaatagtatcaattgaaatttgtgctgtccttggtaagaagacagcaataatagcattatcatgagccaaagcatggaacaaattatgcagttttacgttttaaaggcttaaagttatgtttggttgggatttctccactatgtttttttttattattttaatttctgtattaaaatatatttaacttaattttacttttgttcctaatataatcaacctgcgatcttgtttttctattttttattttgcaatttcggtcttcttgtctttgatctgttaacttgctattcagtaaagccaacatgtaaccctaataaaaaaatgattgtctctaaaatacttttcatttaattgaaattttagttttaataattcctttctatttctaataccaagttttaataaaagataagttgagaattttttatttaaaatttatgtaattaaacatgattaactaatttcttagttagtatgaatcatttttttttatatttaaaaccggaataataggtgtgcatacaacgatatgctaatgaaacaataaaaatttactgagtacattacaaaaaagatatcatgctttaaatatatatacatgttgtgatattaaattatattttctctaaactcatatagaaacaaaaaaaaaaatgatactcaatcaatttaatatcacaaatataattttatcctaacacttttattaaattctaattttattttcaatagcttctttttattaatgatagcaaatttttttatattttacttgagattaagaaaataaataatataaactaacttttttaattaatataaaattaattatttttacttatgaattcagaatgagtactcgaataaaacttactattaaggataatattaaatgacaaaatttatataacaaattgtgtgaattattaatgtaaaagggtctagttaatccatatttttagaatattggttaagaaattaaaataaaaaaatattttttatgaaaaataatagaataacataaaaaaaagtcataaataacacagttttataccttcctaaattttttttaattaatgttccaaaaatactagtgaacatttgttaatataaacttatgaagatcaccgtgtacaatttttgttgtattttaaatccagaggagggacacacaatgtttggtgtcttgctgaagaattaatgttaattaagcaagttgcaggcactgtcactgttgatggattcaagtaccgacgagaagtgattgcgtgaagaacgtgcgcatttgcatttggggtccatatgtctaagtgcagagtgcagaccacacacataacagccatacaattgaatcatcttgactcagctcctcaaacatctctttcatatatttgcttcttggctgttgctttgccttttggcttgacccattatacctgaaatcttgtcttcaacattccaattcacatactcctaatccattggttgcaatattctctaactctaacctcatcattcgttataagcatttactactaatcatggatttcgtaaaccgtttagttgtaaatttgactcattagatctttaatttaaaccagagaagaaggttggttgatggatatattttgctagtgaagaagtgtgatgcaatgaggcttgttaaaatatttacgactttttgtggctgacagaagaaaaaaatgaaaataaaaatgatggtgatcataagtgagaaataaagtaaagattataagtgtttggttgaagaaaaatagagaaaatataacacagtaaattttatcatttttaaaattatttttcttccctattaaaccacctaaatagttttcatctcccctctccctatatccttttcaccaaacagattaatgtcttagaagtttaaaggaacaataatattttaatttgttgccccatgttttaattaagaatgaagataaaatataaaaaaatagagagaaaacacaaataataattgattaatccttttttattgaaaagaaaagtttatatatatatatatatatatataatattcttttctcaaaaatttaaatttcaaagttttctgctggcattattttctctccgttccaacaaacaaacaatattgattctttgtattttttttatctaaattacctttttattccctttaattcttgatttgtaattttgatattcttattttttttgcgattttagttcttatattttaaaaaatctgcagtttggtttaaaccatgattttatttattttattttggtcaaattaaactctaaatttaacatatcaatttgagattgataaaaataaaaccaattaaaggaataaattaaaaaataaagttaaaaactaaatactaattttgtcaaaatttgtaatttatgtagtactttaactttaaagagttagaataattaatttagggcccgatattatgataaggataataatagaatattgttcattatcaataattttaaaatccaaccgatctttaaaccagttcagacactaattaaaggcttgatgatttagatgtaattgaactggtatcaacaattattttttttatattaaccctcttatttatcgaaaaaaaaatactctggttaattagaagtttgacccgaagttaagtaaatgtgattaatatgattggatacaaattattaatatgttgaaggtaaaattaaattatttggataatatctaaatataatcattaacagaaataattctttacatcaaactttgtttaccgatatcaacaaaataatgcataaataatattgaacaaacatttttcataagcttttactatttaaattacacataaaaattcaaattaaatatatcataatatttaagtctagttttaataatgcacaacagtgtctattaataataacagaattaaaaaaatctattaatattaacaacttaatgtctagaataaaaatatgacaaatactttaggttattttttaatgtaaaaaatagttttttttacaattaaaaaaataaagtgtaaatacggttgcattacccgtcaaaaaaaaaagttgcattaaacattttttgtttatctactatgaactgatgatcttcgtaagtttttaaccaattttgactggttcttggactcatggcctcttgaactagtttttctcctatatatatagcaagttttgtaatttatttgagccgatttaccgattctctagtccaattagttggttcactctaattttaagaataatttttattataatactatttccatttcaaaataattgatgttttaacattaaatttcatattaaatgatattttcatttttaatgaaatattaattttttattctaaatctactctaaataaattaaattaatctagtaattttttttagtgttgtgtctaacatttttttaaccaccaccaatcagtcaacaattataaataatgcatttagagtaaaaaatttaataaataatttattattatgcttaatccatatgaaaaaataagtcattgataggaataatattagactatgtctccttaaacaaaattctattgtaactgaaaaaaaaaattgattagaatgaaagatttcaatcaaaggtcaccaattaggttttttgagagagatgactttcaacatatacgaaccaatgataaaattgctttaaaatcaactttgcaccaatggtatctactagttttttagttttgctgccttggtctgtgaattgtaccataaatttcctatttataggtttcattttttttctcttaatttaaattaaattagtgtttaaatctgtttgttattttaaattttaaagtattaatgaatttttcttaataaaataatattaattttatatttacatataataaatttatatatataattttaaatttttaatatatatcagactaattactacctcatcgattgaatcacttacctacaaatctactatttgaattaggtcaatgataggaacagtttttataacattgctttaaacattatgattttgaaagggaggaggcatattgtctacgcatgtttctaactcactcagtcttacgcgggcaggtgtgcttggtcggagttttctgtttatgttaagtggtcttctgaactttttcatccgcgcattgtgaacatattgcagtgtagactgtagaaccgttaacacctttcacgtggttgacaagttgtctgctttctagtaattttctctcttcaattcaacctcatccttgtactacatagtatttcgtggatcgtctaatctttgattctttccctcttggccaaatgttgttactaactcaaacgtatgggggacatatatgtcaaacagtttctatataacccaccgtccattttcaaactatatactatatttcaattaaaaatcgtacagtacttctcttcatatatagttttagtctgcgtttataaaagaaaaagtaaatcaaagcataaagtttttaacatctgttcacataattttatgctagctaaccttaacccttaaccatgttatcgtaacaacagatattgctaagcccctaagccaatgtgaagactaaaacatcaaacctggagctagaggacaaattaaacctgaagacagaagaccattcacaagtggatattttacataattggtgcaacatcacatctttgaataacttcaaagaaattcagcaaaacattacaaatgatcccatgtgcaatggtgtctggtgatgacagaatcacagcaggagttgtgttatatattaaacacagtaagacaagataacctttaattagaacctttatgcttatttagcttcttactgctgctattctttatgtttcctcgcgttaggtaagaccaattagctagactatgggtcaagaatcaacaccatataaaaataataatatacatgaacgagatttaatatattccgatactacatcgagttctagttatagctgctctttatctacaattttactaaaatgtaaataaaacaatacaattttgtctaaaattatgttgatgttcagatggattaaaaagttttaaaaaaattgctataaagtctaaagtcacaattccatacatctatttattatactttttcagaaaaaagttttgtctaaggacaacaattatttaaaaaataataatattattaattgttccaattgcaaccttggtcaagggagagggctagattcccttcacgaatgacataaaaaataaaacattgttagttgtatttgaaatattgtccatggtggttcttaattatgtatttttacgattttgcacttcaaaaagcatcttcatgagttaatggaagatgtttataagctattattgtcttcgatacattagttacgtgagactttttgataatatgaaacatcaatatgtttttattgcaatttctaataaaaatatcccttcttaacaatggtatttaatacaatgatcgattgagaaagctgttttaaaatagaagttgaataaaagaaagtccccaaagcatgtgaaatgagaatatggattaatttttttattttctagactatattatttttaattagagataattttgttaaagacaaataagattattatgaataataaaattttagcttaaaataattatatatttataatttaaatttgagattttgaatcaaaccaaaaacaatcaaaggtgagttgatgtatgcgtgcttcgtggtatatggattaattttctctcctgctaaaatcaatactgccataaactacatttttcttttcctctatggttataaagcaataataatcatttcaaaggcagtgattatttggctggcaacaaaacaaacaatgtatctgcttgcgtgtctggtgaagaaactcaagtaaatacaaagagaggtgtacggacaggtccacattcatttcccactccaccgccaagttggaatgatttgactttagctgtgtctgacacgcggcggctaaaatcaaaataaataaataacggctcttattaaaggtaattaattataaattaaaaaataaaatatttataatataaatcataaaataatataaaaattatggtaatacaattttttaccttctgatataaataattttattatatattttataatcaatattcttaagatagagattaatatttgtcataaataaacactaattagtgtcttaaaagtattaattaaagaatttgattgaaattttagttttaatgatttttttatttttaatataaagttttaaagaagagtaagttggtaaaaaaaattagattttaattgtgattgatataattaaatatgattaattaattttatgaattagcataattttttttaaaatatttgaaactgaagcaaatatatatcaaaggataaaactaatgattttttcactttttgtttgtatggttgcattgaagtgttaggggaaagggtggaagagcaaaaaagtagatggatattggagttcatgcattgtttggtagaaaagtgcagagatttttttgtttgttaggtgaagtaatgacattgttgatttcaactcaaaatcacatgaaataacacaaaaatgggataactaacccatttaggtctcttttagaaattaattttcaaaagggtgggtctatttttaaaaaaattgcttgcatggttttacttttttattatgaaagattaggtcaaactataattttgacaagcgagtttaatgtaacatatttattttttgttaaaataaattaaggcttgggctgacattatgaaagagagaaataagattatttatttgtatgtggtgaaagaggtgtgaaagaaatagaaaatggatgagacccgcaatgttaattctattacaaaatgagcagaattgagcactaattgtgggattggaaatgacattttatgctagttacatttgtagtgatgtaaaccgttataaaagatgtaataaatatatttttgttgtttatgacagttcagaatgtcattttgtggttgttaattgaaatcacctataattatgcattttttagtggtttaagatcgttagtaacgtcttttgtttttttttttacttgttaacattttgaatggccagtaatggacagtaatatttaaaaaataataattcaattatttattacataatccaattttctttttcctatctcctaaaaacttcatttcaaatatttaatcttttttatattcttttatctcaaccaaataactttactttccatccctctttatattatctttcatctcttttaattctttttctttcataacgtttttatttactttcttacctctctagcaaacactaaccaagtcaaatgatgacatggctactgcataaaattgctattgctaattgcatttttaacgcaataataagttgtcaacctcattaacaacaacatgcaattgttacatgtttgtccatgcgctagacgtcaactaaattaaagtagtaagtgataattattattttactgtatgaggtgactatatgcataaaaattgcttggagtagcaattctaattaaagtaacaaataagaattattacttcactgtgtatcacatgatcactcattgagagacataaaaaaaagtgtttgaagtagtaattctaaattgctactccattctatttgacgtgacacaggtacaacacataaaaaaggtctcaacctctaaataaaatgggtgaattcaatttgacgaaaacaaggactagcccaacacgatcaaacttcgtgttaagaaacaatctacagaatccgtgcaatatgcaagatgaaattgctattgcaaacaatagtttcatctatgatgcttacgtgacatgtcatgtgataaaatttgaaagcttgaccccattaataatcaaaacagacccatgccaaaaaaatgttctataacaaaaaaaaattgttttgtaaaaatcccattttaaaagaaaaaaatagtttgtaaaagtgatccaaaaaaggtcaatcaacccacaaaaatatgccactaattaacgtaatcagttaaggcaaggggtataaccaattatgacatcaacaataataaaataataataaataaaatgatttttaaattgaataagaggataaaaataattttcaaaaaaatttatgaggataaaattgaaaaaaaaaaactaataatttacaaattaacttattttctatatgttactctgaataatttatgaaaaataaaatattataataaacatgtgtatcaaacaaattgatcaaaataaattacaagttgattaaagaaacttataagtttttcaaaaatcctacaaaaaacactcggatcaatgattagctcactacaaattattcaaaaagtgaattatgttttttaacaaaaaagtgagctaatataataaaaaattgtgtgataaaaaaaaattcaattcaactcattacatgttggtacatcaagtactttagtaacccaactgactcatctattttaaaaatttaaaaacttatagaaaaataacaacacatatacaacaagtccaataacataatagttcacaagaataaactccaaataaaaaaaataaaattatcaacaaagtttaaacgcaaaaaaaaagagaaataaatatttttttttataaaataaaaacatgttaatacaagttggtttgactcattcaagctaacttactttaatccacaaattaagtgaattgagtcaaattaatccacgaaagtaactttagatttttttaaaccaattaacttgcgagcccaaatgaaatgtattagctcacgagtattgacggatccacctattatagtaggggataattctttccacaagtttttttttatttgtatgtattataatttttttttgtcccagaatagatattgttcccacaatatatcttagttttaaaaaataaatgtaaaaaatataagaaagaaaaaaagaaaaaaattatattaattttattactttatctttttaattttttataatattgataataaaatattacaaaaaaaatttaagatataaaaatgtgtaaaggataattgtaacttataaaaattttaagtattttagattttttttatcataatatcatatgttttataaaaaaattgtgatattttttacaagaatattataaattatttattgtctacattggtttttttttttctgatgtcactgttctcgagccacagcatactttttttttaagtgacggtacgttaaggttttagaaaatgtcccgtgaataagaaaataggatattaagaattattctgtttatttaaagtatactttttagtttttagttgtgggtagttgaaaaaacaaataatagaagaataactatagatgatattacatataacattcacttttaataaaaaaaattattaatttttctatttattaaagagaagagactcggactaatctaaaattcatataagaggtaattaaaataaaatattattgaaacgatttgattttaattttaatatttaataaatagtagaattgaacgataaagtgcataatgatctgttatataattagtgaggaatataaaatggatagtgaagtaagaaacaaaagtgagggtggctttcagagggaaaagtggtatacacgtgaagtggagaacaaaaagatataacagtttatacttaatatacacaatacaagcataaagtaaaacgtgacacaataatgaaatggttgacaatattttaagacgtcaaatgaaaaaggcacgcaataaatcagaacgaccttgtccatggctcgtcaacaaactctttcttatcttgatgtgcttcaaatgcaaatcatccaggtagaaaaggaaactaatgttcaagaataagtgagattcataatattttttataatttaaattcatccgtttaattttacttttttattattatattaaaatagtataaaagttatgtacaatattattatatttttttattttttttcttaatcaaataagaagaaataaaaattttatttgtctctcttttcgtttcattcaaataataaaacaaaattttcattttttcatccaaaaaaaatcatagatgcttatcatttttttcctagtgtggtaatatattattacatacaaaaatcagttctaatataaacattaattttttaatgataattaccagttgttccagtgtataatacactatcatttttttataaaaaaaattataagtaggattatataagagtttattttaattttttataggagaaaccatgagtatcttataattcaatgagtcatagactcatcgtggtacataattattattaacttaaaaaaattatacttaaaaaaaattaaacacaaattatcttattaaataaattcttctctcacataaacaataaaaaaaaaccttacacaatttcactaacctgtaggttatagtttttttataatcttttattattatatatatatatatatatatatatattaaatagtaaatattttatggatttagaattataataattattttttgggtcatcatgttatttatgtgaagtatttatttattttattgatgtttaatttttatcaaaaaattcaactaatcatctttaaacgatcttttctcctaactatgtttacttttcattcagaatgattttaattatcatttaatatgactataagacaattttatatttaaaattagttaaaatataaaacttcaaaattttgtaaatgactaaataaaagttttacatattaagtaggtttgcttgatttagaatattatgtatgattgaactaaataataattcataagctaaaatgttgagctataaaattactacttgtgatactcagttaagtttttctcttgacatatatttctttatattattgtatagtaaaatttcgcataaaatatataacccatgtgtagtttgaaattcatgaataaaatcataaaattgagcgaacttcgatacgaattttgacctaaaactttgggactatttttaatttttaaaacttcaaaatattacagtgtaaattggatattagttttcttaaaaataatatcaatataaaagtaattttacaacaaaacttatatagacaacatatttaatatttaaatctatgttggtatttaaaaaagaaaaattaatctcaagttcggttatgaaaaagttaactttattaaacaaattatcactaggtgtcctgtgacttatatctgaattaaaacatagaattagttgcacatgagtaattaataaaaataaggctttattgtaattttttaagtatactataccagtgacttgatatgttgcttatattataaatctgaatatttattttcaaacgatatgacttttaagattatttttttaaaaaaaaattcccctggaaaatcacgtgatttggagatgaatcctttcattaagaatagtatctatcactctcggtataaatattaaacagacccccacttatttaatgcttattatgaggaatttttttaaattgtcattaaatttttaaagtggagtttatataataatctttctcttttatgaaggggaaattaaatacgaaattttaacataactttaccaaatttaaatttaacattattttctcgtgatttctgatgcatactatatatatatatatatatatatatatatatatatatatatatatatcttaacatttgcttaaatatatcttttccaatttgaatttttattttgatcttcaaagtttcatataccttatcaaattaataaactaagagggtgtgtctaaatttgaatattttgttttcttaaattatttatcaattataaaagctttttatcttttaaatttgttattatcccatgaaatttaatttaatttaatttagttttaatcatcaataatgaagacattttaaattatactcttttcaatataacaatattataaatatttaataataatgatatttaaatttcttacataaatgcatttaaatttgataaaatttaaaaaaaaatatttgcataatataaaatataaaaaaactagttaatttcagtaatatagattgtattgttattttctcccccactttgtttgtttttgttgtcgtcgttgttgtattcaaacaataatactagtataaacgtataatagtacaacgtagttactgatttttagcggtacaaaaagtcgattgtggtcctgatttgtaggaaccaaacaacacttaaaggcgcacccatttttattttttctgtgggctaccattattatcccacgccacaccagagaaagacaatttacaggtggagtgcagatttttctgtcgtccacaaaattataacaaaaaaaaaaaaagacaaaaagagaaaactaaatgtgaaaatggagatgaaggttccagttcccgacccaacacttatttttgttgttgttatacaactaagaaaattaaatttaaatataaaatttaatgcaaataattttaattttatcaccattagataatttatgtttataccgaggtagaaattcctctctctatccccaaagttatttatcctttcactcaaccagaaaaaaaaaaaaaagaaacagaaagaaagcaaatttggttcctaactcgagttactcgtgcatgttgaaaaaaataaataaataaatggttagaattagaacgccgcgttttcactttttgcaaaaaactcggcgtgggtatttgggttttcggggaaggctcgcacttattctcagtgttatctccagacctaaaattaaaattcacactaaatgcactccaaataaattcgaaacgcaaatgcaccttctcttgttctctctctcccaaactcaatccctgtgagtgctttctttctgtaactaacttgttccctcgttaaccctaatcatcaactcaagcagtgaatgaatctgtggacggacgagaactcctcggtgatggaggccttcatgtcgtcctccgatctctcctcaatctggccctcgccggcgccgccgcaatccacggcggtcttcaatcaggacaccctccagcatcgcctgcaggccttgatcgaaggcgcccgagagacctggacctacgccatcttctggcagtcctcttatgactattctggctccactctcctcggctggggcgacggttactacaaaggcgacgacgacaaagccaaagccaaggccaaggccaaggtcaaggtcacttccgccgccgagcaggaccaccgcaaaaaagttctccgcgaactcaactccctgatctccggctcctcctcctcctccgccgcctccgacgacgtcgacgaggaggtcaccgacaccgagtggttcttcctggtctccatgacgcagtccttcgtcaacggcggaggacttcccggacaggccttcttcaactccgctccggtgtgggtcaccgggggcgaccgtctctctgcctcggcctgcgagagggcgaggcagggacacgtgttcgggctgcaaaccctggtttgcataccgtccgcgaacggcgtcgttgagctggggtccaccgagttaattttccagaacccggatctgatgaacaaggtgaaggttctgttcaatttcagcaacaacaacttcgacatgggttcttcttggcccgccaccagcgccgatcagggcgaaaacgacccttcctcgctctggctcagcgatcccgaagttagggattccattaacactgttgctgctaccccttcggtttcggttcctgcacagactcaggggattcgatttccaagaccatgcagttggaaagttctattcaaacccctggttccagtactttaaccgaaacccctagttctattcacgcgattccgcagaaccagagcgtcttctccagagaattgaacttttctgagtatggtttcgacccaaagactgggaacaatcagaatcaccattctctgaagccggaatccggcgagattctcagcttcggcgagagcaagagaacctcctacggcggcgtcaatgggaattccaattccaattcccattttttctccggtcagtcgccgtttgttgctgctgcggatgagaacaccaacaaaaataacatcaacaacaatgggaagacaaagtcaccgaattcgcgcggtagcaacgacgacggaatgctttccttcacctccggcgtgattcttccggcctcgaatttgaagtccggtggcggcggcgattccgaccactcggatctggaggcttcggtggtgaaggacccggtggtggagccggagaagcggccgcggaagagagggcgtaagccggcgaacggaagagaggaaccattaaaccatgttgaagcagagagacagaggagggagaagctgaaccagaggttctacgcgcttcgtgctgtggttcccaacgtgtcaaagatggacaaagcgtcactcctgggcgacgccatatcttacatcacggagctgaagtccaagcttcagaccctcgaatcagataaagatggaatgcagaagcagctggaaggtgtgaagaaggagctcgagaaaacaaccgagaacgtttcttctaatcacgcgggtaatagtagtagttgtaacaacaacaacaagttgtcgaatcagaagttaattgacgtgttggagatggacgtgaagatacttgggtgggacgcgatgataaggatccattgcagcaagaagaaccaccccggggcgaggttgttgacggcattgatggagttggacttggacgtgcaccacgccaacgtaaatttggtcaacgatatgaccatgctacaagcaacggtgaagatgggaagtaggttttacacgcaggagcagcttcgtgcggctctggcggctaaggttggggatgcacgatgatgttggctctgcactttgcggcagcgtttgagattatgtgtgtgtttgtgtcgtgttattagctagctagctctttgtaagttgtgctgctctgggatattttaagccttcccggtagctgtttctgtaaaattataagctttttttctttattgggtagcttagtattgaattttgaggtaatcaaattgggaagctccatggagtagtagaactagctagggacacttttcatcaaatctgtgggtggagtggagatagcagcagctatatgtggaaataggggtaattttatctgttttagattgtgtatatattataataatatcataaatgtgaacagcatcatgcaagttctcaatattattattaatgcttcagcttatcagtcccagtgattactgccatttcagttatgccaatcaaaccatgtttgcttctgctgctgctgctgctgcaatccttgttttcttttagtagttgttcaaataaattatactgaaagaatatcattcttttaaaagtttctgtgttatttttggttggagcatgaactatgcacctattgttacacaaccataaaaagagaacaatttttgaatctttgctaattgtgttctttaggcgttctggttcattggctgtctcggtctggatctatcattaggaaaagtatcattttttgtgtgattgagttgatagcatggttgtcatcggggaaccaaaatttccatgctggtatgagttgatgttccttttaggccatgtgaaaaatgcattccaacagaaaatagaaaatacatcttccttctctgtctttatgctgacaataattctttttgggcgctattacttctttgctacattttcctgttaaatcctctggattattttttcccatctggtaagccagtttcctattcaggtattctgctaactactgttctgaccctactaccaactttgacaatgaaaatgtcttccgacatgcatggtagtattaagggtaaaaaacagggtatcggatactactttagtccaaagttgtctgtgtacgaggctacggcatgtatgtgtttgtggaatctgaatcagtgctaatacacgggaatagccagcatttcaccatttgaaaaagacccaaaagggtggctctttctcttaaactacactgaaaacaacatggaatttgaagctgcttttgatgcgtttacaaactactactgctatgttaagcttaaattgttataaatggagtttatagcagttaggctatgtatttcacaagctacatagttggacattttgccattttaggaatcctgggatacaagtatatatttgaataaaaactatttttaagtaaagtttactagttattattataaatatactaaaacctttaacgtagtatgattgctataaaacaatttattgttccaattcagttgtatgtgttgtaattatggaactctccacttaaagaaataatctcattacaaacttgtttacgccaaaaaaggaagatgaaattgccactattaattaatagaggcctttactgtgttaattaatggtccttgcagttttccccatgtgggtgtccttaactgccatgaacaatataatcttacggatttgttaccaaaactgattagtttcttcctttcctcatcatattgggtatcagctgtgaaatccactttctccttttgatgtcctagcaaaggcaaaggtgttcaatgcttttacagtgctaacatagtgcatcatggccacacttgtagaaagcaggcgcaggatgcatggtacaagtccatgtagagacggaagaaactgaacaaaggaaccgctacatcttaacgtccacgatgggaatttcgtagttggtatgaatgtgtgggataacaactaagcaaattatgagttcatgtttgttctcccttataattattttttccaaaatttcttatatacacttttgattccatcataattttatcaaacatgaaagttataatttagaagagtattaacaatcactttttaacctatactttcagacacacttatcttattattattaaaatttattcaaaagtacaaaatcatgtgagtaaaatatattaaataaaaaagtgagactcattaaatatttatgtttttaataaatattaatcaataataaaaaatatattatactataaagtatgatgctgacgtttctctttactctaagaccatttttagccttctatcatcatcgagttaaattcttcacttttcaagtgaaacaatggagtaagaaatctaactgtatcatttccctcatcactatgttccatctatagaattcagtaatgaatttccgtatgagctgtgctaggccgccaagagaaaataatggctagaatattacaaaattatgctcatgttttcatacatatatatatatatatatatatatatatatatatatatatatatatatatattatatttaaattaaattcaaagagtcatacccgtatatagaatgaacagatatgcgacgaaggagcagagagtggcaagtagatagccgtagccatcggaagaagagtggaaagataaccaaaaatacaaaaatgttctcagcatttgcttagtaaattaattattctttcaggattatagatgagtaaatgacattgtcaagcaacgcaaatcttaggctgatgcaaaagattgcgtgctccgaagaaaatggggtgcttcatttttttctctcattctttttgtccatttaatatgatgagattgacgtggatcatattaaattttatgtggggttcatttttgcttcgtgttcatccaagctttctagtagtgaagacgtttttgaataattaaagttagttgaactcgtaagagcagctataaacaaagtgatcactatatataatattaaaaatacgagaaagcacggttaatagataaataagaccaaatatcacataaattaaggtacataaattttttctttatatttatctcctctttcaaatcggaggcctttgcacaaaggtcaatgttggattacatcaccatgaaatcttaacatattagtctatttaaaattatcttccatatgtagggtaataaaactattttaaatcgatcaatagactccattgctaaacaagtccatgagcttataagctaatgtagccatcacattagaagtggttaaaaccataaaattatattacattctattgtaaatattaaaactagctcaagccaactttgtcaagcctagtaatgtcagagacaatatatattattaacatttctcttactaaaaatctttagtctaacttacttaactagcattttaagaaacttacttaactgaaaaaaactttttgaaaaacctaaatttattttttgttaaatatgttaatcaatcaagctttaaatgaagtaagatcgataacacctgaattttgaataagatcataaaatgcatacgaaatcattttttaagccaaacaattaaaacacgtaacttttttttaaagaaattaaaacaccgaagaacctgtgtattacatcacatcaaagatacttttatataatgaatggttgatttaaaaagaaaccgtttattggacacgaattgattctaaattaaagaagtggaccagagcatatgccaccatatatatgtagcacttaattaaatctttcctttaacgacaactcaagaaaatccacgtcaagttggttttataattagaatactgacatccaatggacccaatgaaaagtgattaatacctgttctagtcttcttgatacaattgagttatattcttgtataccaaaattaagtattatagatttataggcacatgtttctgaataatatgatgattttggagtaggctataaaataattaaaatatttatattactttccagttcatgaagctcaatctagtacagaaaaactccaaaattctaacataaaattaagatttgtcttttttttcttttcaaaatgagtaaagataaaataagtcattttaatcattgataaggttaatatttgacatattcataatttattatgtatgaatatgtaatatccactataattttttttatcaacaattgaggtgtttattttaccttctaacatgaataatttgttttagaggaatcagatcaatttaataatttattgaactcttatctaatagattatagaatatttaaaagagaagatatttaattatgtttccaaaacatcccaaaaataaataaataaattgtgttaccaaaactttcacgactaaggatttcaggaacgtaatcattattatacacatttttaaaaaaaatttaattttaaatataagatgtattgtcaaatgttgaattattcttgtaacaaaaaaaaattttactcaatatctcatgttttttaaataaaaatattgacacctatttttgccgtttaaattttgacttgtaaatttaaaaaaaaatagttctatatggaatgatttttagttttcaagttttaaattatttccagttatttctattccaactttaaaaatttgttgtcagtcctataattttttctttgaaaatttatctttataaatgtgagactgttcattgagattgttatgaaaagatatagaatgagagcagaaaaaaatgttttacgttttttttttacaaactcaagttaaattcaaatcatatcatgattgaattaagctaacaaactctcaaatttattttgtatttacaatttatagcttagatatccatttcattgaacgggttgtgttgggttgatcaatgccttaatgttaacatcaaactatagtaaatcatattcaaaagtctaaatgttggtttgagactataacaaatcatactcacaagtccaaattcaaatcaagcttttgaaatgcgcccaagttttgaatgtaccagttttttgctaactaatcccatatttaaaaggttaaaaatttaaagttcaaggcatactaaaaaccccaaatttaatttaggcttctaaaataaagtctaagcttggtgaatgtctaatttgtaagaatattttcttgccttagctaagatcagattaaaaagacttgaatttatcaagacgtgctcaaacttgaaaacataagttgtgtcaaaacatgttttgctctctgaatccatgctttcgcaaaaggacaaacaatagagtttgagtttaaaagagatgaatttaaaattctaatacctaatttaatcccctttgctaccacaccttttttacaattttaatttacacgtatatttaaaataagttatatataaatctaataattatgttttaattaaaatatatataaaatatataacaaagatattaaaaattaacaagtccaagtcaggaaaaaattatataaaattataaatatcctcttgtattaagttttaacttgtcaacaaattttttcaagacaaaatcttaaaaagttaccgaacaccaaaacagtcaaaacatgagagacaatgattctaactatactacatgaaaacatatatataacaggatgactgtctaaattactaaatgcacgattcaaatgtgtgtagaggataccaggaacttctttttcttcttttaatcaatcaatatggatattgacgcataattagaagcactaaacatttgtatatatgtgtgaacttgtcttgtcaaaacgcaactttataaaaggtggcaggggagtttttcaatatatgagaaaaagagttaataaatccgattacttagagggaaagaaggtgatgagcaatgtgtaattgaagttagcagaaggattatgcaacaagtcaatgattgccacaaccaatcaaggtaatgtatttttacaagatagtaaatataaaatatatggaatcaaagaataatcttcgctagagttattctgatcagtaattcatgcatacatgttaaatttcgataatccaaatattaaattaaaaagttttattagtagattaaattcatattttttataattctttaatattttactaaataattttaatttaacttgtaatatattttttagaatacaaataaatgttacttataatattatataacttaagtattcaattttatctaaaatttactatgtatgatcgttggaataacattcagatacttaattattgaacaattaaaatttaatacaaaaaaattattaaacaaaacaattttgcaaaaaactactcttcaactaattttggacaaaatatgattagtctctcattttcaaagggcaaggaaaaactttggaagggaataaaattgatgtaccaaattatataaagggttcatcatttttatgtcaactaaggtgggtcgacagacatcaggtttcgtatgcttgaattggctcataagtatacttaggattaaacaaccaacccccctttgtttttgttccacaaccatgacccttttatataattttttttgcactttctttttttaagaatttttatttcaataactttatgcatgtagttagatctaatctttcaatttttttcctaaaagtataatttttttacatatttctagaaattaaattttagaagtgttaaaattttatgacatttctaaaaaataatttcaggcaaagataaactcatgtttcttagtgtcctctctctatttcaaacttcatttatctttacattgcttgcaacttgcctctgagatgagacgtgttttcattattttttttacacaagactgaatagtaagaagcttccgcattttaattttttgaagtgttaaaattttgcattgtttcaaattttaatttctagaatattgaatctaaccacgtctataagggtatttttgaaggaaaaaaatcgacaaaaaaatgtggggaagtagttggaaataggttttgcaaagaaaaagatttattttgggtcaagtgtgttttgtttcgagctgggtagaaataatgtcgggccattaaccatgagggccgagccgtattgaagatattggcccatctaattgggtcctttttaattaacatttgggtttttttttttaaatattttttggaaagacttactacttagataaatcattatgatacccacgaagaattcctcagcaaagagaaaggagcagggaaataagaaagaaatcttaataggttaaataatttgtttttctaatgtcaattttcgccatattaattgtgatattgggtatattggcgtgagtaaatatataaaaatattattataaagttattcgaaaaaacaaacatgctaaaggtcattagtactcgtttggaaccatataaaaatattatttataaagattttcttttgtaaagtactcgtttagaaccatataatttttttttcatttttcttatattaaaaaattgttactacattactatattcatctgtttactctacagccacgaacccttgttaattttaaaagcagctaaaatagagggagctaggccaatacttgagttggtgccaaaataccaacaatctaattctaaattttataactgcgaaaaaaatctcaaattaggcctataccccggaaatcatgtgatgaaaaaaaaactgaaataacccctcaaaagcctaaaatagataaaaaaaaaaacaaatatgaataatctcacatatttgccaagtcgtaaatgacaaaattgtcccccttatagtaaaaaactatccaagaagaccaagaggaatcaatgattcatttggtcaaatggacaatagtacatgcaataaccatatgcctcaattagaaatgaatggctaagctgtttccacggttcagaaatctatgccaaaatatagcaaccaggttgttctaatcagttccattttcaaatcctctcttgcaacccatcaccatcatcatgtcttcatcccacttcattccctttggcctaatttatataaactcattccctccccaccccattccaccaacctccctaccaacataaggaagagctggttttggttgcttgagacacaagaaatcaacaatacaatgagtctcaattgcctcacctgcagccagcttctccaaaggacagactcctatggggagttatttgcagaaaaggaatacactaaaatatgcaaacaggttgatagaagcttgtcaagtaacatgtcatcatcaacatccaaatgtgagctaccaaaaggtggtgctgtggccaaggttaaggccggtcatcgccgcaattatagcactggagacgttccttatcctcctggcagcccaggaccaacattggtgcgaagcagcggaatgagaagaaactggagttttgaggatgttgctgaaaagaaagaccagggtgtgagttgacactgagatcagattattgttctatgtttccttgtttgtgatatatttggcccttttctgcattgtgtatactttgtttgtgggggatgcaaagattggacatggggtttagtgtggttgtacattattaaagtatggtgtttcaagcgcattgtacaagttatgagctctgttttttgcaccaaattaattcacatcccttctagtttttgtttttcattttctcctttgaatgaattctttgtaactggtggttcaatttattaattcatcccattttaaaatcaatctttctggcttctgctgtgtaagttagaatactatatctaatgttttattcaatgagattgataacagctattttacaggcattctagtcttctacacgagacaaaaaacaagacaccaagaacaaagaagattggtagcttgtctctttaacatgctttgcactaatgaaaatttaaaaactctctatgcatacatagcatgtcataaatattttttcacagtggagatggtctttctgatttagctccatgacaagtatcaagaaatgaccaaagtcagctaagtatgttctgtaatgccctttctacatctgcaatgaaaagtatgaatgagtaacttagtaaaagggacagattttcttccgcgtttataatttcaaagcttgccaggtaatgaaacagcgattgtccagcattctttacattatataatgtctataatacaacagaaagtccactgggataaatactttttttaaaagaagaaatgaagagtcaactagtttttctttcttctagcttctgctttccaatctcttcgacccagcaccactctaggagtatcagtactaacaacaccagaagatccagactgaatttccctctctggaactgattctggcttgtttccaatggctaagcatgtcacctcaggtacactaattatggttggaggatcaatagatccattcatttgttgatgcttaaaaacatgggctcgtcttgcatcctttttccaatctcgtttacaatagatacgggtgacgaagttgttgttgttgttgtggttcctgtttggttgtagttctacttgcacagctggtgtctcttctacaacaaatgacttctttgtttcggcttctagacgcttacgtgccctatatcttcgttgtctctctcgattcttcagacgtcgagtcattatgtcattacgcgcttttgaacgtactctttgatcaacagacttcatcatagaactatcttgtgttccagctgcactatgattgttttccattttcagaataggggtaacatctgcagtaatcacgtcagctagcgatgaaatccagaaaatcatttaatgtcattcctcgtgatgcatgcatatgaaatttttttttagagcaagctagccttttagtctacattgcttccctttaggcttcagtagcctctccagtatcacaattaatcatattatataatcaccaacaaataaagccgagaaaaaactacttcaaaatagtgtctgcacttcattgagaggccacttttctgacagtgctccatccataacctcaaggataagttaaaacttttaaataaatatacatgttatgaaagacaaagaaatgtcaataatggaacaaaacaaaaacaaaattatattaaaattagaaatcaaaaaatttatatcactcctgcaaaatgtaaaagctatcctgccaattatgcaaaatgatgattctctcctctttcatatctttcagccctctttttatattattttcgctaaaatcccatcaaagtgtactcaaaggcatgaaaaggcacacaacaccaaaagggtcagagcatttctagttcatgcaagacatgcctttagcatcttattgataacgctaaaatactctgaaagcctagccatctaactggccaattgtgatgctaaaaggaggaaatagtcagaatgttaaaagaacttagaactagccacctaatttgctaactgttagttttgggactcttagcagcaaacagcttagggttttgtaaagtaagtatcattttttatgatgaattttatgcttggtagttcacttttgaaatttaacttccttttgaaagtgccatgtaaatgaaatactatgaaactcttgaattaactgctccagagactagaggcagtcattaaccagaagaggtgaaccttcccagattattagtcttatgacaaccagtgttatcaattgcagaacatctgaaaatggcggaaagccaataatctgctatatcatatagcagataaaattgcgggccaatagcagaagttgcatagcaattgaaatatatgatatatatcaattatatatgtatagaaaattaagttgtaggcaaataaaaatcaaatgcacaaaattaacataatattaactcaaagttcaattggagatccaagaaattcccatagcagccgcaacagcggagtcacaattgcagatccaagaaattccataatgcagcagaagcgctatagccccactatagtggctatttaacaacacatagaaagatgaaatgtctttcaaaagcttgtattagatgaaaatgtactaaacctaattcaacctacaaaactagttcaagaatgaaggctcaccaaagttattataaaggataatttggtcatatactcagctgatgtggaatcataatagctcatcaaccactcatcttatccatagatgcttcattagacataataaataacaaaagtaaataaacaattcaatacaggcatttaactgcaaattcatccaaatgttttatcaaaagtgagcaagtaggttccattgtgtattctcttccaaaaaagaaaacaaaagtccaaaagacaagggcaaggcacactaggacaggtaaataaggaatcctgcagacgtaaagtggaccaattttaagaatttttccactttcagttatgaaggaaaaatggttttaaaaaacggtccgtgtgactgcaaacttagcagcaacatcaagctttttagactctttgcaaccacatgtgcccgcaattgcagctgcatcgactgcaatgtcaaggatcacttgaaaccacaaatgtgactgagactgccgtttacagccttgaaaggaggtgcacaagtttgtatagggagggaaaatgagggttaactacagtacatgcaaaaccacctcagtgaggtttggacaatacaggtcccaagacttagtaccacttgagatgcagctcttgggggtccacttttgaaaaaaatcaatagaatgcaatgccaacatgagtacatgtcaataagcaactagtaaattattacagaaacccagatcataaaagacaaagaatctgagccaaagggtatgaactataaagttattctagtaacagtctataatgtggcaggaagaaatcaagcaagaaaaatgggaactttaattagtgacaacacggttacagtcatagccatagggttatgcaacaaaacagattgcaattgaaccttgcaaaattagccacctaaaggggttaaagtgagaggggtttcatcctcaaattagattttaaaaaatcagattcaaaacatacaaccatgtgtatggaacaagtagctctgcaaaacggaaactttaaggttccaaggtgaaatggttataggaatgtatattaaaagagtgattgaaaggtggagaaaatgcagaagagaaaggtgttgagttaattaccttagtgggtgtagatccacacagaaaaaaaaggagaagagagaagaaaaacaagtgtttgaaactgtaaggaatgatgggagacggtatttgtgtttgtttaggttcgtcaagacacaagaaaatatgatgacaaaactcccacacagtttggtcttgttcaggacacaaagtttcctgcgaacgaaatcacacgtgtaaagtgtaataatactgcaatacctcatacttttaaatttagttacgcatgtgacatgaagaataacatggggtggtggcgcagttggctagcgcgtaggtctcatagcttctgagtgatcctgaggtcgagagttcgagcctctctcaccccaaatgtttttttagccgtgttactgattttgtccaaatacttttgaatttaatttctaagttgataaattacatatttgtgaattgtgaaagtcataattagtttaaggtgataaattggctttaattaaaagtgaaaaaaataatattgtaatttaaactttcttaaagcattcaaaatgaatatctttctccttagattttaaccaattttttaggagtcaatgaattcttaaaatctctacaattttttacttgaatagtaagttatcttactacaaactagttctacgtgggaaagaggtgtaagaaagttttttcacacctttggattttgttagtttttattttctcctctttcctgatttgcaacaataaaaaattcataacctctgatcaaatgtacacagaagcaaacgtttgaattacaactatagaattgctagcaaacgattaaattatctgagcaaaatcatttcattgaatataatttttttaaaaaaatttcaatcccactttttattttcatgtcactctcacaaatcacactgatttgaaaccccccatcgaaatcccaaaaccaccaccaacttccacaatccagattcgctcgcccaaacaccatggcggatttaaagagccatgcgtagagcgtccactgcgggggagtcttatggttcgatccaatggagttgagtttgaggatctgaataaatttcagttttttgtttctggttctgagattcccctcttttgattcctcttgatggtgttgtaatgggtttgaaatttaaattttattttgttaaatttgtctttaaaattttcctcttttaaatgttgttgtaatggttctgaaatgtttatgctttgttgttgattttgggtttcattgttcattgtgggattgatccttaattttcagatttaaggaactgcaatgaaccactggatggagatgcttactggcaaatgttgctaggtttatgcaaggattacaaatagaaaacattaaactaaatagaaacagacgtcaacaaaagcataaaggagctttaaaaccaagcatatttattaagatcgttagacttttatatcaattattttgaaactcatatcacatatattttctaataaaatggtaatgcaaaaataaggtttaccaaaatacatgcaaattataatgtgtgtatatatatgtgaaaaataatgtatctatattctggaaaatcttatgtaattcataggacataactcaagtttttttctctaaaaaaaaaactcaagtttgttaaatcattaagttcatatgaaataatttacataaaatatgaagttcaaacttcactactctctcatttaatagtaaaataaactcaaattcattacaaattaatgaatttcttattagacaaagattaaaatgattttaaatactaataatgtattgtttatttaacttagactcaattatattattaattatttattttatttttaggattcattttaattctttatctttcaacaaattatttttggtcatttatcttttaaatttgagttaatttggtatttatcatcatagttatattgtttatttcgaaacacaattttaattttttttttactaatttaattgaagatgtaaagtttgttttattagattcacttaaatgaaattataaaattcaaccaatatttgaataaaaaagaccataaatataatgaaaatgacatgaaatatatgtttaacaagtaattaaaaaaataatttaatattatattcttttttagttattcaagagatcaattttacttaccatcttcattatatttatgatttgttttggtacaaacaattgttgaattgcataattttcttgtaaataaatttaataaaataatttgtacttcttaaataagttaaaaaaagattcaacatcatatctcaaaataaaaatatatcattattttgaaataatcaaattgactcaaatttaaaagttaaataattaaaatgattactctgaaagataaattaccaaaacagatataaaaataagattttttttatagaaaaacgagtctttaatatattttatactataaatgaattttacataggtcatattattaggtatatttatacattgttttatatagttagtttatttatttatttaaaatttaaatagtactcatactatttaaatattttaaaaaaattatataatcattcaatcataatttattatatataataaatttattaacttttaaaataaattaattaataatttgtgattgactgatcctgagattgactgattgcacataaacattaaattcataatcaatgtattctatatatattataaaaattgaaaatactcttttaattaaaaaaagatttaaattatatctatatttatattttaagaaaattaagagaatcagaatacgaaattgattaaagagaaaataggcttacgtggattgaggaagtcacattagcatgaattgcaatttgcaatgtcatctgatattactaaaatgtccttatcattcattcattcccccatcgacccactcaccccaacttgttctcttctccatccttagggttttctctgctccttcgattttctctctttcacacttaccatcatccatatgcactttttgaattagtcatactccctccaaagctttgacttttgcctacaaccctttctgggtccttccctttccgctttattcgcagctcccactttcgcaatttcgcgttttgatccgatctggtgctcaattttccgaagctgcttcttctatcgttgaaagctccgaaaagggtatgttttctgcctcttacctcggctctagggttaactttgatgctgttggtgggattgatttctatttgggataaaaggaattgagactcgaattaggaattttggaatttgcttggcttcaggatgcttagatcacagctcaggattggtttgttcaattagtgtattagaaattgttgaaattcaacgggttttttaggtttgactttgaagttttgggttgtccttggaagcttataaacattggtttggtttacttgaagaggaaaacgagtggtgatttctcattgtagtaaggtttgttttgcaaatggataactccaaaaacaggcataatgatagtttgggtgtgaataagttggggaaaaatataaggaagagccctttgcaccagcccaattttgctaataatgctgctaggcaacaacctcagcctcaggtttacaacattagcaagaacgatttcagggacattgttcagcagcttactggatcaccctcccaggatcctccacctagacctccacacaatccaccaaagccgcagagcatgaggctgcagaaaattaggcctcccccgttaacgcccatcaatcggcctcgcatgccgccgccaatgcccatgcctgctgcccctccttccgttccgtacaataatgccataccaagacctgctcagtttggacaaccgcctactccgcctggggatatatggtctaatacaaccgagtcacccatctctgcttacatgcgttaccttcagaattcaataatggatccaggtcaaaggggtaaccaagttcagcctcagccacatccataccctcaacctcaagtgccgggcaatgttcagcctcatcctccgccattgtctgctttgcttcctaatcctcccattcccatgtacccatctctgagatttaatggacctgttccacctatgaatgctacaaaccctccagtgcctagtcttccttcaccacaagcaaatggccctcctccccttttaccttctccaacctctcaattcctcctgccttctccaactggttacatgaatttgctatcccctcggtcaccatatcctctactgtcacctggcattcagttcccatctccgcttacaccgaattttccattctcgtccatggcgcagccagggattttaggccctggaccccaacctcctccttctccgggccttatgtttccgttatctccttcaggcttttttccaatctcaagtcccaggtggagagagcactagtcttaatttgtgtttacagttgcttccttctaactggagagatccttggcttgttggttggtatgtgatgtacaatcaagctgtaagagctctttttggctacctgtagtattcatttctcatttctttgtttctcttttgttgacaaccataatggttgcaatccttttattttgacaagttttacattaggcaatatattgaagatcagacaacacaattggacagttggatggaagctgtaaagatggaagactgatctgtagctcaaaaggaagtaggattacagacaatatttgttgtgtatgttatcttcttttgtaatatagtggattacatcttaaagttcatagctaatttcatgttatcttttcaatgtaaggtgttttgaagtactgatcttatggtttttaccatgtgatttgcaacagatatatttttacttcttcaggatatcttgttcttcttatcttcaaatagttccttatttcatttaatggcttattggtggatttctttagctgcctcgtactttggacttgtttcccggtacaatgattttacttggaattaattgttatgttttacctactaggttatgttattcagtataaaggagtaaattttgaatttgatttctgtttttaaacggagcaggtggggagagaataatgtgactacttgactgactcatttatgttgattttgtagttccttcttttgtgaatcattagatgtaacttaaccagtacgtattttatcatctgctcttgaccatcccttggaccctccttatgttctgattcttttcctgttaaattagcttctgtttacatcagaatatctggttcccatgcaaactcatgagcatgttcatgctatccagaacatgagcttgctgatgtattactcagatctacatgccatgccttgagaaatgataagtattaattagttttgtggccttacgggtttttaactattactagctttcttctatctgattataggggtgggttgggttgggttattttctcgctttcttccttctaggtctggatttgcctatttgtgctgcatcttctggattttattttaacgtgatgttgaaacaacatatgatttagctagctttatggacaggaaatgtaagctgaatagatttgccgaccctccggatattactcatgtgaaccagtgagtgcgtgttcagtttcaccttatagaattgattttgagttcaaaattaaatttaaataatttattatatgtttggtttcatgttgaagcttgctcataattgattttgactctagaattaattttgagttgaaataactttgagtatgtgttggatcaatgaatgtatattgaattttactcattgataagtataccaaatttaaataactacacatgtttgcattgataaatataaagtgtataatatatattttgactttttaggcatcctaactaaggatttagcctttcatagatataagaggtcttacactttgaaaaggggtatagtgattgatggaggagaagagatggaaaaagaatataaaaaaaaaaaagatttttcctatttgagatactcaaggcttacaatgtattcattagagagctttcagtatctcgagtggtgttttttttttttttttttgatttcttttttatagttgttggagtgacttggatgtgttacttaaaatctttcttattcatatttttgatacttgctttggatcttttttgcttttaatccatctttttcatacctgaaagtcataaataagaaaaatattaattcctatcatttaagttgaaaataactgttaaataaatatttttaaaaatattttcaatatatttttattataaaaaatagttcatatttaacagttatcaattggatcaatgaatgtatattgaattttacttaaaaatcaattctaacttaaagcaattttatttagaatcaattctataaatgttgttgataaaaaaaaaaattctataaacgctcatccaaatacttctaaaatttctgggttgtgtcccccggctcttttaatgttctgtaattctaaatttcgttttgctgacccttgtcttaaacaatcaaggaattaataaaaaaagtttctattaaaaaatacgacggaaatttacatgaaacattaaatattgtacatgttaataattttttattttttactctttaacttctaccattgctttagccaaactattgtaaaattgatctggcttttttatgaattgtttttattgacaaattcaaatggttagttaggttctttcattggtgtgctttgtaaagtttgtttcagcatttcaatatatcaattttactttcgttgcatgtttgattcctgattcctctaaaataagagggtatataagtgaaaatttagggtgtatgtatttaagggtgatgatgtctctatctcttgaaacaaaggctgataatttgataacccaactcaagtttatgggttcgtctggaggaggtcaatgcctgacgactatagcatgtttggattttcggtggaaaattgtttcttgcaccttttgcctaaactatgattttgatcttcccaatggatatacaaatgcactataattaaattgtgaatacttaataattaattatgtctaatggtttatatcataatcgtgaaatctggtctgatcattgatctgattgagatagtgagttagtggtctaattggtggaccaataattgacccgatttgattcggtctatattataaaatttaaaattatgtgtatatattatatataagaatataactaacattatttgatcaagaaaaattcattcataatttcatactccaaaatctaaaataacaattatagtattaaagttgataatccaagtcaagtgtattactaataaagaggatgtgaataacaactacctaaattaaaacacaaattcaaattttaataaataaaatgagcctaagagctcaatttcccaataaacaaaaagagtccggatcaactttatgcacttccattattgtttcctgcactcccattattttttaaacatgcacaacttagtccgggtttccacagaaccaaccgggtttggctagaccatcttgagtcacatgcatgagcagtcaaatagtaaaatcgatccgattatgtaattggattccgattgaaccggttgagctcaccagaccgaaccgaataactaaggtttatattctttaagttatatatttttttatttaatgtataatatattttttttgcggttaggattttctacagacacttttttgacaatagagaatctatcacaagaacaaattatattcaatatgaaatacttctccttgatatgcttaattataacatgaagatgaaaccaaatcatgattttgataaaaaaacaaaaacaaaaacaaaaataaaatctttatgaatggttaggctatatatcttcaagagttgacacacatagacctagggcccatgaagcattctcagttctcaacgttgctgtccagttcccagctctctgtgcctgcagtccgagtaccctacgaccaaggcccagcatgtttttaaaatgttggagttggagatgctattatataaaatgtttggtaaaggtatgttttcaaaattgtaatggtgattgagtttgtttggatttaagttggaaatataaacacacaatagataatagtaagttaaaagtataataattttataaccgtacgtttgtaatcttgtgtccaaacacatctagaattggtcaagtggcaaagtctggcgtgcgtaggtgcaactctttacgcacggtgccacagtgtttcttaaagccttggatgtaatactaaaataattaacggtacagatcgtacatgtgtaacatgtagaaaagacattcaataacaagctttttttaagagtcttcaattttctctctgatccttccccttcttcatgttttctgtaatctctcttcctcttctacaacatccgacgacaccttcaacaccacccttcccacctttactttctctgtgaaaatcaaaacccactcactttctgtgaaaggaactgcaaacaattcatgcgaattgaaaaaaatagcaagtttgaaatcatagcctaagaaagcaaaaatggaccaaacccaaaataaataagctactgcaaggtttcataatttgaaactaagcgtaagatgtatgattctttgggattttgatgcttgtaattgcgttatggttaaaatggatattaacaaataattatgaaaccttgcagtagctgatttaagatttaatagttaaatataattgagttgtggttaaaatggatattaacaaaataagagactaacagtcatgaattataatttttaatgtaactattttaaaaataaataaattgatgttttatggtttaataataatataaaattataaagtgtatagtctattttcttctaaataataataataataataataataataaatttttacaacaacaatattattattatttctataactttatattgctatatttttttttaaaaatatgtttataagtttccacattacatgacaatttcactggcaataagaagtttacatacaaaatgaaaagagaatgaaaaatattttaagttaactttttatttttaaaaaatcaaataaacatcatattcattatttttcattgatctaccgtaaatcaatttatttatttatttaccaaatttaaaccgtttttgactgagttatggattctttgatcatttttcttttcagatcgattctaaaatttatttgaatcaaacatttaatcggtttacacttttctgttctgaacaatgaatttgatctcactttcaaaacactatgcgttgtgctcgctcgaaaatggaagtacaatggaacatttaatcggtacatgttgtgaacatgtttacaatacaacaataagattcaacttttatggccctacaaaacgaaagcattctattttagaatcaaacgaatatttccattttgagattatatgtaagggggatgtattgtaaccataaaatataaataaaaaatattttttataaatttaaaaatgaattaaaatgatatatattttaattgtattcaacaatgaatataacttcaaagttttttttactatcttgtaacttctagtaaacttttaacttttttctatgatttatttgatatgacatttcaattagattttaactttatttgttagctaaaagatttgtttaattattcaataaataagtttttttaataatttctagcgtttttaaaatattatttgaggtgacggtttttttaaaatgctaccttctagtttctatttttttatattttttcatttttattctttttattgaattttttagttatcatttttaaataaatcataattttattatttttttgtcattttatactttttggctatttcaagaactagcttttatcaaatatttataatttaataaactattttttttttgtagaactatcaaaatggactggcccgatctgttgggtttagcccaccttgacccaccacttaaacgagcaaacccaatccggttcacttaaagttgatcccagaaaaaagttattcaaactagctcaccacatgttctggattaaacgtgtcggttcatcaatccacctaaaaaaaatatatttgctttttgtataaaacaaaaattcaacaaaaaaatatattttttagaaaaataaatttgaataaattataaaaatattaattaaattaaatcttctactaatcacataccaccacaagacatattatcacaagttagaagcctataactataataacaaaaaattaaaaaatagtcttgaacaaaatactaaataaaacaatgttgagcaatattacaaaatactaaaaatgtattttagatgagttttactcaatttttagttaaaagatttttttaattatataatataataggttatttttttagatggttagatgggtcaggttaacctaccatgagttcagttccagtggatcaacttgtgactagatcggaccaagattttaaacaaattgtaactttctccctttgtgaacttaatccgtctgaatccatggtgatcaagttgacccatgggtttggatccattttgatagagcgtgcacacattatgtatcataaattatttataaaccaattttataagaattaactttagagattgatgaaatctcatgttacatatagtaaattttctactattcaaattaatatttctattttgatgataagtgtaaaataaaaataacaatacaatataacataattattactcttcataaaaatattatgaccaattatttaattatatatatatatatatatatatatatatatatatatatatatatatatatattatttctttctaacaactttatttttaactatcatagttaaagtttttgattttctaataaaatttcaagttattattaccactttaggtcatttggattgattacgaaactaatgaaacaaataattaatcttagatatagacatacttaaaatttttcatttttgtctaaagatatgttctatggaaattaaattgtttttttttttcaaaaattcaacatgtactgttaacttaactgaattaaaattgctagcaacgttttttataacattaaataattgacattgtatataatagtataaaaatattatgacctttttatatatatatatatatatatatatatatatatatatatatatatatagctaaaagatactctttacaataaaaagagacaacttttattgatccatgttttatacgaaagccttttccaaatttctaacaggagcatctacaaacaacaaagaaatatgattggacttcattttatatttttggccctacattttcatttcgttggctttagggggcctttacttgtgattgtggccactacttttccctcacagaagagccaataatgaactagcaaaatgaaaaggaaatgcttcaatttggactaaaaaaattcttcagacacaccagcatttgagcatttccctcttctaaaaaagctagtctttgtagcttctattcctccttgtcgctctctatctccaagttttcccctttctttagtatcaagttggcaacttgtatccaattggatgatctcaaaagggcccaagtcgctctctttaccctttctcatcgtggggcttagtgctcttcacgtgttatgtttactagaaggaattttgctaaaaaagaaaaaagtaatgaatatatataatttttaagaatttagatactcaacaaaaaaaaggagacaatttttattaaataatataatttaccgaatcatcatatataatataaaagacagttatttactggaattgtcagcacatatatcattcacatatgcaatacttattccaaataaaagtcccttaaaaacaaaaccctctaaagatatacactttttttttctttacctaaatcccttcaatccactaaaaagattcttatatttaataaatatcttttgttctatattatcaaaatgttgaagacatcatgaagttcataataaccatgatctaaaagaaaattcctacaattgagagaattctctactctagtccaattaatgcgtggccatgctttaaagttaaaatggcaatcatgtcaatgtatgaatcaaatggtttcctctcatcagtcacaaatggataattggatatacctgccaaaaggggtggtctcacacgtcggacaatacaatcagttttaacatctacataactttcccaggaaaataactgttcaagtgctcatcctctactatttcaaaagttgcttttcaattgcagtagccccacaaagacaaaattttattttcctcacccaacttgcatttatttatttagtacatattactccctgctgttgtttcaatgccaaatttctgaaaaccactagtgaagagagagatgtgtcccacttgcttcatatttttgaatggaataacattattaggtagttcagtatattaatggtcttaatcaagttttacatcttatatattcatgtttttcattttataaaaataaaataataatactttattttattttgtcatatcaaaataaatagaaattgtgataatttctaactatatctaataatttctcactattaacaaatattcttcttttcttctaaatttagaagaaatattgtttcactaaatattattcaactgatgtgatcgagccatatggaatgggacaagaacaaacgtgcaagcaatataaaatgagaattgccaacactttttttataatttttttttaccattgaattatgttcttcactcactcaataattcaaaaataattttataacgaatataaaatgtgatttaatgataaataatattaataagaaaacatattgataattaatatttttgccctggagcaataaagcatgtttttgttacaaataattgagtaattgactaagtaagttggcaacgaaagacgtttaattaattgaatttgtgcacttccacgcaagctgttcatctacagatatacataaatcaaattaaaagtttccaagcgattaaagactaatactcatagagacacagataaatttgttaaaatcttcctttctaaagagcattccccaaaactgtgaaataacaaggaatctacaaagtttattcctttgtgagtacgtatttcgcacagcgtattatacactcaagcaaatatagcagcgtcctcatcttgcttaccatttcattatcacaattcattgtaattttggtatatagtagtttttttaaaaaatataacgatagtgacatatttaaatctgcgagattgcgaccttatataaactaccataacccatcagcatactatcatagtatgctgtctgcatgcatgatggaaattggaaacccttttatatatgtaatgtataatcaagaccatatattattaaacagagattctgaattcttttaattaggcgtaaattaaagcaaagaaaaaaagtgatactaaaataacaagaggaggttgtaaaagtgagacgaatttatcgagtatgatagcttttctcctccattggtggtgttcgattgattgttttggacagtgctcgagcaaaactcaaacatataaatatgatatatatagttaaggaaaactcgacttagattgtttcacttcacatatttattcattattttttgtgaaatgttagtaagatattattctcttttttttcatacactattttttgttataacatttattaaaaattataagcaaaactcattcagttttatagttcttaaaataaagtcaattaagaataaagaatatatccaaaaaagaatgtgtttaaagatatgttaccagcactactctttcgaattatgttttctatgttgacatgtgtaatccacagtccattgggtagagtatgaaaaaagtaaaatatttttttttaaaattaaaataaaatataaaagtaagagtttcatctcattttattgttatttttataattattttggttcttttttaactccgaggaacagaggggatatgggagatgattaagaggaaaccaaagcaatgcaagtggttagaggatatatatgttggctaacaaatccattctaatacgttcctggaaaatcagtaacctaacatggagacgttgacactctcagtatccccgaacagtgacactctaaaagtgcctcaacaatactcgtatgtgtgtgtatatagtagtattattatacaattttgaaaagaaaaaccctacattgccagctctatagatactggaaaaccctgcatatatataaattgggaaaaaataaaataaaaacaaaaagggccaccacgtaactatacctctcctagcaacacattgaacgagacatcaatatcatcataataataatgatcataccttacaggtaaaccatggggccctagcagcattgtgaacgaacggttaagaagtgtgcaactaactacaagatttggattattattggtaaatgcccttaattggataccaagagccacctttaaacccaacatgcaaatggaagcaagagtgtaagactacaaaaaaaacttggcagaaaatgggtccttctgaaatttctagcttccttataaatttcccttttctacactgcaattcagagaaagatgctccattaataatgatatctgacaccataatttattcccaaattttcacactaacccacccaccaatatgagaaacaaaagcactgtgaattgtgaaacctgcttggtaggtggtggttcaccttctgattataccttcctaatgggttccagcatcagcatcagcatctgatccaatatttaccattaattccaactatttgttgggtaactttagtagtatttgtcaaattcaaacgtgttttattttgacagtgggtgttgccgttgtgtgaatggttctgacacgatttctgtttctatctaatttcctattaaagtgaaagaagattagatgcaaaattaattcaacaaattaagttcaaactcactctatactgcagacttatctaaatagtttgtaaattaaatttgtgcaacttttcttactaagatgaataatgctatgaaaataaaataaatataattaaataatccaaattatcatatatatatatatatatatatcattccctttcctctcttttttctaacactggtatcacatataattaagtcgttgacatggcaatatgaccattatttttaatagagaaactgtatttgtacaacttctgtatttttttgtataaaaagaaataaatgtaaatctgatacttgtgaaatgaaaagagattgaaattaaataaaataatatttgtaaaagttatcgtataatgttttaaagtccaattacaattgaagtcttatacaaatgtcaaattttggtgcaagatttataaggattttgactcttttgggatgtgagtccacctaatattcttatcaaaatgaagaatataactctccttaatgcaatctacattattcttacagattgtaccggcatgcatgcatctcttaatgttcatgagaattaaacctaaatcattttaaaaaatgttaataatacatatttttaacatatttttttaaaagcatacatattctttattatggactaaaaattattaaaaaatataaaatcatttttatttgataaattttacttataattttataaattttaaccaatataataaatactaaaaggaatatattaaaaagcatactattggtatttttttcttataaaattactcggatgagtacctttcctaccattaattaaatcactaggacgaagaccattcctagcattggttagtacgtatagcataaatattcaacacaactctttggacatttgacgagattgaaattaaaataaaatgtaagatgttttattttatttttctttttatgtatattgctctaatctcataaccaggatgacttgggagttgggagttagtacttaggcgttaacctttacattgaaaatggaagatgattattagcaaagtatttactttattattagagaagtagataaaataatataaaaaacaatcaacaatagtaaacaatcaacaatctagtactttcaaaattgagaaaaaaaaagaaagataaaattaaaatcaagtttattccattttgcggttagactaaaatgtagtttcggtctccttgcatttatattatttgtgtaattttagtctctaaatgttatcatacgcatttatattatttgtgtaattttagtctctaaatgttatcatacgcatttatattatttgtgtaattttagtctctaaatgttatcatacgataaaattgagttcctctattagtctagcatctaaatggtagcagaatttgctcacatgagccatcttttacctaattaacaacatgacgtgtaactaactaataacatgaaacaacatatcaaaatatttttaaaaacatgcaatgctatagttaaaaacatttgatgatggaaatagttatcatgtagtagtaactaaattagtgtggatagttatttctacaaccttcctaattaacaagatttaacagtaaacttatttgattctttcagtttatagcacaagcatctgcgatctacagaaggaaacatctttaagtaagcttgcactcatgggagaaaaaggaaaaaagatttatacatggaataaaatcgagcaaaaaaagcaaatgatattcacagaacagaacggttaaaaagacaccatccacaagcatcacaaagtcaacatttcctgtacacgtgcattgaccgaaatgccctcacccattgtaatagcaacagaaaataataaaaaacagaacaaaaaaacgacagtctcacccgaaaaaaataaaataaaacgaaaacaaaatgaatttgaggaaaaaaagaaaataaagagaaaagagagaaaaacttgttttgcttttctccttttatgaattgacgagggagcgattagtttcaaattccaattctttcttttttttctttaatatatattttgttttattgaggcgtatttgcttcttcaccgcgagtgtgacttaccgtcaccgtcgcggttggttccttcggtgacggaggcgagcttctggaggttgagcttgacgacggtgtcggcgaagagacgcgtgtcctcttcggtgttgccgtcggggacgtcgacgacgtaggattcgaggacgacggtgtagatcttgccgtcgtcggcgtcgtcctcgaaggaatggacggtagtgacggagcggtagttgcggaggcggtgttcgccgccgatgatgctaaagccggtgacgcagcggatgtcgtcgaggaggtcgaggcgttcggtgctggtggcggcggggaggccggagatgacattgacgtcccgagtgacgccgacggccatgtgaaagggctctttgacggcgcagctcttgatgaagtgcttgtaggtttggggcttgtcgaagcggcggacgacggaccagacggcgtcgggcggcgcttggacgcgctgggcgaggagtgaggagcattgcccggagccgacgaggtaggagtggtgctcggcgacggaggggatgagggaggcgaactcgagcggggtgaggccggagggagggttgatgtggtggttcgtcgggtggcggtggtggttctcgtcggagtctggctccgatgtggaggcggagctctcggctttctccatcgcggggagagagaaagcgagagagagagacagagagtgtgggggacgctattggcgcttgcgggacgagattttgaggaacggacgggggtattctcgggaattcctctctaaacctttgttttctttctgtgccacttgctaaataattcactgtttaaagttcagattatacttacaagaaaatatgtaacaaaaaaaattgcaagaaaatatggagcttaagtttaactcttcctttgggagagaggtttaaatagaataaaaattgcaagaacagagagaataaaaataaggcttaaatagaatttcggttttttttatttaatttttaattttgacttttttattttaaaattaaaatatttgatttttctattttaaaaaaattataatttggttgttcttattttaaaatataaatatttggtccctatgtatttagaaaatctgtaattttggttttcgtattttagaaaattcataattttgtttacattttatttctttttttactttttaattaattaaatcattttttgatgatatgttaaatgaatataataggtttagggtttaattggacaaaaataaaatgaaaagttaaaacgtaaataaaattgagaatttgatcaaaattataatttttaaaaaatatgagatctaaatgtctctatttcaaaatgaaagaattaaaataattaattttttttaaagaatcaaatgtcttaattttaaaataaaaggactaaaattacaaatcgaataaaataggaagactataattacatttaagtctactaataaaaaatattttaaaattaaaatagagtataatagatgtgaaactcatgtaattcaaatttaaggtttctcctttcttctttcaaccatcaaattaaacttaaaactttttcctatgtttcaattttaaattatgaattatccttaaaataattatggtaaaagttaataaattatgcttaaatgatagtgtaatattcttttatactgttaattgttaatacataatctattttttttctaagtttaattataaaaaattaaataaaaatacaaaattaaggttgatacagttccgtttaaattctgtttcacacacaaaaaaaaagttacatttaaattctattttgacttggaaactttgatgttagataatatataagtacttttatcagtattttttaattatgaggttcatgtcaattttggtaaaatttcaaaatttaacttatctatatcaataacatccgatcctcccgatatctccttttatatatatatatatatatatattgttggaattaaattaatttcttagatgaaaatcatttattaatttcgaatcaattatgttaatcattaaaaaattcataatgatcaataatttttcataattatgtaatttaactttctagatcaacatgtatatttttttgagaaaatcctttaacttcctctctataatgagatgttagaaaaaaatctaaatgaagagactataacttgtttgatacacaatcctaagattattttttgaatatttttatcctaacccatcataaagataaagatagaattattcttcaacctcgataccttgaaggtcaaatgatctaaatcttattaaatgatttttagttgggcttaaccttaaatgacagtccacaatttataattatttacatataagatcaacattggattaaggatccaacatatacatcactcattttaattgaatctatatataaaaagcttttatttaattaggtataattgtttaaatgttatcattatcgtgtgatatgttgttaacattatttgttaggaattatagcgtgtagtgtttcaaatttacataaatatatatttaaattaattcttacaaaaattaccttaaagtatgtaatatagtgttgagaaattgatttcttttttgtattctttagggagaaattgattattatttttatcattgtaaactaaacgaactaatttgtattgattgtcctttatattatttctcttaatttcggttttgtggctaatgtggtgttatacacttttactgtttaagccaatttgcataatctgaaatatttgcacatatgcgcctattataagtttagtaaaagactagttgcatcgataaagaatcataatataataatatttcttatggtttgatattgaaaaacatgacaagagtcccagagagagagacagtcgagggagaatgagaaacagaatcagagatctagttactaggcgatagaatatatatatatatatatatatatatatatatatatatatatatatatatatatatatatatatatatatatatatatatannnnnnnnnnnnnnnnnnnnnnnnnnnnnnnnnnnnnnnnnnnnnnnnnnnnnnnnnnnnnnnnnnnnnnnnnnnnnnnnnnnnnnnnnnnnnnnnnnnnnnnnnnnnnnnnnnnnnnnnnnnnnnnnnnnnnnnnnnnnnnnnnnnnnnnnnnnnnnnnnnnnnnnnnnnnnnnnnnnnnnnnnnnnnnnnnnnnnnnnnnnnnnnnnnnnnnnnnnnnnnnnnnnnnnnnnnnnnnnnnnnnnnnnnnnnnnnnnnnnnnnnnnnnnnnnnnnnnnnnnnnnnnnnnnnnnnnnnnnnnnnnnnnnnnnnnnnnnnnnnnnnnnnnnnnnnnnnnnnnnnnnnnnnnnnnnnnnnnnnnnnnnnnnnnnnnnnnnnnnnnnnnnnnnnnnnnnnnnnnnnnnnnnnnnnnnnnnnnnnnnnnnnnnnnnnnnnnnnnnnnnnnnnnnnnnnnnnnnnnnnnnnnnnnnnnnnnnnnnnnnnnnnnnnnnnnnnnnnnnnnnnnnnnnnnnnnnnnnnnnnnnnnnnnnnnnnnnnnnnnnnnnnnnnnnnnnnnnnnnnnnnnnnnnnnnnnnnnnnnnnnnnnnnnnnnnnnnnnnnnnnnnnnnnnnnnnnnnnnnnnnnnnnnnnnnnnnnnnnnnnnnnnnnnnnnnnnnnnnnnnnnnnnnnnnnnnnnnnnnnnnnnnnnnnnnnnnnnnnnnnnnnnnnnnnnnnnnnnnnnnnnnnnnnnnnnnnnnnnnnnnnnnnnnnnnnnnnnnnnnnnnnnnnnnnnnnnnnnnnnnnnnnnnnnnnnnnnnnnnnnnnnnnnnnnnnnnnnnnnnnnnnnnnnnnnnnnnnnnnnnnnnnnnnnnnnnnnnnnnnnnnnnnnnnnnnnnnnnnnnnnnnnnnnnnnnnnnnnnnnnnnnnnnnnnnnnnnnnnnnnnnnnnnnnnnnnnnnnnnnnnnnnnnnnnnnnnnnnnnnnnnnnnnnnnnnnnnnnnnnnnnnnnnnnnnnnnnnnnnnnnnnnnnnnnnnnnnnnnnnnnnnnnnnnnnnnnnnnnnnnnnnnnnnnnnnnnnnnnnnnnnnnnnnnnnnnnnnnnnnnnnnnnnnnnnnnnnnnnnnnnnnnnnnnnnnnnnnnnnnnnnnnnnnnnnnnnnnnnnnnnnnnnnnnnnnnnnnnnnnnnnnnnnnnnnnnnnnnnnnnnnnnnnnnnnnnnnnnnnnnnnnnnnnnnnnnnnnnnnnnnnnnnnnnnnnnnnnnnnnnnnnnctatctcattattagaacaactaattaataatttatatgcaactaagcagagctcgcctgagtaagataatactaaccatattaacttacaactaatatggggtgatataattgatataaataatctggtttcttaaaaatatgattagacattcgaatcaaaatttgcattataaaagacatgttaaaagaggttagacattcgaatcaaaatttgcattataaaagacatgctaaaagaggttaactcattgaatagatttcaatatttcaaagaattaaccttggctcctatagattttctatttttagaaaaactaaccaaacttacataccatagcacttgcttttcaagtaattgacataataaaggcttttaatcttttatgaaattatagttagaggtcaattttacataccaaaatgaacacaaacatgattcaattaatttcaatagtcatcaaggactaagcgcaaattaatttcaaatgtatttttaattgaataaagataattaagataagataaaaacataatttatgcatttaatataaaaaaggggtgtacccttttattttctatacattttttttgaattaggagtgaaataaggacgaaagaaattgaaatgatagaaataaaatagaaatataatgaaaaagatatgttatttaaatgggtagaacaaatgaatgaaaaatattctcttcacttgtttggactagtggaaaaaagagtggaaataaataagtaaattatataaaaatgttttatattaattaaaacttttttttgctctgttatttttatttattaacataaaagtattggctagttatcattgtttttaaagaaaaacaaagtgttaatgttaacattataattacttaattagtgatttttcatcttagaatgttaaaagaaactatttttttatggtagtttatatattaagttttgcaagtcaatagcaacaatcttacaagtagaaaaatattttgtgaataatagacaatagtaaactaagtaatatcttttttagatttgtaaaaaatatttttattttttatagtaataaaaaatatatatttttaataaaactattaatctattttttttataaaatatatatagctatgttttaaaatatctgtatacaagaggactttattgattgtctcgctctcgatccataaaatgtgagaaaatctcttaactttattggtttattcttgattaaaaaagtattaaacacttctgtattagtgtatgtgcaaatgttgtagagtttttttttcttacttttcgggtcaatgaaaagatagtataaatacttcacatgttaattaactagctttgtttgatatgaagggatcaaataattataagaaacaaaaattatataaattcatacttgaataacatttgaaaaaaatgtgacaacccatgcataatattatataagaagaagagtattaggatatataaagtggttagctagcattcttatcagcacgaagagtattaacacaccttctaatacatctttttattatacattttatattgattataatttattaaaaatatatatgataaaaagaaagactcattaaacaaagcgtgagacaaaaaaattataattttaataaatttaaattaataataaagaatgcattaaaaagtgtgcattagagagtgcgtggttaatatttttctattagtattattaattttgtgtctagattgaagaaattaactaaacgagttttacataaatagttggcgagtatatccacattaactgagtggatgatgaatttataaagtattattactgataatataaaatataaaataatgcatttaaatcttttaaaatttgatttttttaaataattaaattaatataatatcattttaacgataatttataaaattgtcattatacttgatattgattgaatgttttaaatattgatgaaaataatgtaaaaatattttttaattgaatatccaattaataaaaataataatttaacttgatacaaataattgtcaaatacacgtcacaaaatgagatgatatataactatatgaaaaagaatattatatatatatatatatatataaaagatggattacaataattagacaatattatacaatgtttcaaaacattccccccaattaaaatcattaattatcacatcacaacacagtaaatataaaattgaaatttatataataagctgattagttttaaaattgaccatatatactcatttattaaatcgtgcataattacaaaacttagagagtagcaacaagtcaaccactattaacatatagtaacttaatgataagtatctaaagcacatgctgatgatggccaaagtcaattctaataaaagttgcaacttgaaacatccacatgtatggatgtgtgtcaagagatccaatttagttaattaaataagagtgtatgggttataaaatttttgacattattttttatttttgcagataaaaaaatatcaatatgtactttaacatgggaacaatagaaacttaccacaatacttttggtctataataaattaaatcaaaattatttagatttttcaaattctctattctatactactagtacagtatatggttattaatttatattaaaaaatcgtatatgggtttggttggggtgccaatcggttttcccattacagctatcatcaccccatttatagcaaagagaaaaattaatattaaagatggtagtatcccacattatgataatacaaatgcattcatgtcatggtttcgggtcaaagggggcaattaagattccttcacgacaagttgaataaaatatggggatgttacgcgaagcatcctaagtcactggaagttcctgtgcttgtaaatgatgaccatgattaattgttttcataattcatatttcattgttttgcttagattaatgaatatatctaatgcttgcatcatctcattcaaatggtggttaattagcatttaatgagtgacaaatctcctgaagttgaaaagaaaccctaggtataggagaataatgcgtgaggaactcatcaaatagttataagtgtttgtataggaaagaataatacttttatttttatatttattttcagttggatatatacttgcacatacaatataggctcataattaattccatttcgtccctgggaatttgtaagagcaaaatggcccacaagacattgccgagatgcttggggtttccaagtccacaaagtgttgcgttatgtcaactgcaagttgcagaagctacccacctctcctagcattttattttatgcattaccttcatggatccacaccactaattcactaaaaataatatcaacaatataatttctacaataatttctacgtatctatctttttttctttgatctcttttcattaattacaccacctatttcgatgcatatctatatctattctcttcttatttctcttgcgtatgtaaaaggttaatgtatacataactcaaatataatattggagcatggggtttaattatgggcttcaacatgaagtcgcaattgaagacatcattatcttagaacggtttgccccgatgaaagggaagattagtcatttagttgggtaccaaaaagaaacttaaatattttttgattacaaaaaaaaatataatattggagtgacatttttttgatgttaattctctagttgataagagaaaaaagacgactaatctgaacttcaattaaaaataaataaagtctgataaaattatttttattaaagattgaatttatgtgctatctaaattatttaaccttaattttagtccattaatcatttgatttagaatgtgatattgattgcttaatatatctgaaatagagaaaattaagtacacccaaaaacaaagtgaaattaagttgactaataaatatagagatattaatgtagttattctccgactctcagttttgaacgcaatgcaattagattaatgtgctacggcacaattctagaagaatctgatgacaatattttatcgaaaaataaaagctgaaaccactaagggaatatattattggatcaattgaggaagttcaggattatgattgttgtctctattaataatggtgcataaaataataaaacttggtagacattgaaataatttcattggttggtgcatccaaaagataactaaagtctaaagatgatgttcatggcacaactagaaactgtctgcttgtagccaccatttgattccattattatgatgaaatgaactctttcttttaaaattttcttttccatagcgataatttcacaaaaaactttcctatggatgtattatgaggtcatctgaattagacagattaattagttcgccaacatgctcaaaattagacataaggttacatagaaatctgattaatttttaagtttgtgtgtgtaaaagaatataacaaatcaaaccttaaatcaatttatgtatattaattaagagattattctctagattttggttggaagaaatttcaggtcaaaaaaagaaaaactgatatcaaattttcttttttctgattctaatttttctttctctttgggaaataaaagtttctccttaatcctacttagagagaaaatttcgtttctatccttttcttcataaagtgtttataaagagaacatcaaatacaactttttcacgattaaattaagagagatgctatatgttacgaaattaatctctatggaagtaaataaaaaaaagttctttttttattggttaaaaagttaaattaaaaaaggaaaataaaggcatttgatcacagaaatcatagagaaccattgatttaaagttttcgtgcttaaacgttttgtgcgatttagcaattttctaaaattaaataaaatttcaacacgagaatatccatttcatttaaattgcaagattcacgaatcacgatcacaaataagtatttatcattttaaatttcgtggtcatgaaaagatctcctagccggcagtaagagcaggcgctgctgctcatcatgttccttttttaattgataccatgaaaagtaataagcacaacgccaaatattcgattttttttatagttattttatatatgtgccattgttaaggcacgatcacgtagttctctttaggcctttcattagtgggtgtatccgattccaattccttaataaatgaatttttaaatgcactttctttagctgagagtacattatattgagaattataggaatgtgatatcattcacaaataattttaatatttaaatatgtgattaagtatttgattcttataatcctatatatatatatagaataaaaataaaaatattaaaagaagtcagcctttaaataagtactagctaaagattattctttgcctttgaaccttaaaaaaacaaaaaggaatagattttaaacagacatccaaattccaatacaaccgtagctccattttgtttttctaagaaattatgtatttcacccacatttactttaatcaatgctaagtgcacaacattttggctctattaaaaaagtgtcatgtgataatataatatttttaagtaccaaattaaacaaactattagtacatcaaatttgattattccctaaacgcatcattagttttatgttatatattaaatcagtaacatttaaaaactctaggcctgtccaaacgatgagatcaatggcatctctcttccaataattcgacttaaataattagaaatattggattgtctgaatctgaaaccaaatgtagtgtaattacagtttatgatttcaaatgtagttgaatctaccaaaatctaacctcacatactttattgtaataaagcaatgtaccacataagttcaaacccaaccacataaatgtctattaatgctcagggtggagccaaaagcagtaaaaagaaaaaaccaatataaagcgtatatcagcaacctagtagttttaaatgtggccaatttgcatttcttttcattcttctttgttctattcttcaccacctgctgcttaggaaggcacgagtttttaatttcttgcttctcactcacacatttttcctgcaccgatatatttgtcaaacatagatgatattcattattcattccaataatagcataggattctgtaactgtaaccagcagcaacaccatgtaaatgacttctgtgttttgtgaataaaactacttttttttttattaagatatgctgcaaaagatgttgccaatgtaataataatataaaacagaaatgctataatacactctgcctacgatgttgctagcaattgatttacattttcgcatcataaaaccaattgcaggctctttggactttactgcttaattaatttagatacaaccaaaaaggaaaagataacatactagaagctccattaactcatgatgcacatgatttgtttctttataatctgtgtgagcatacacactatgtggtcctcttgcaaattttcatgttaggtataccttatacaaaagctcaaaccgagtattctaatctaactagagttgggtacatttttttagggtgaaagagacacattatgttaatatattttctcaattctagtggttatcattttattttttaggtaaaattatatttttggtctctctaattgtctctaatttaaattttaattctcttttattcatgaatttaatcctctaattatgttcaattttgtgaatgtggtctctaagcccagacttaaacgttaatgttacaaaaacaatcatatgttcctttataatagttaatgtttaaatggagaccatctttacggaattagacatagttgaaagattaaattcataaataaatttaaagaaaaattaaaatcaaaattagaaataattagagaatcaaagccttgattgcttatgaaatttcaagctatcaatgtctaaaatcaggaagttacctattttttattctttgctataacaggacaatatttagatatctagggccgaaattccaagccctcattgcttatgaaatttagtttgaccggtggatggttacagttaataaaaaaaattacaggggttagttgtaaacaagtaaattataatgttaaacatttcatttcatttctcaaaaaaattactatataggcaattcactactgttattttggtaatgattttttttcttttcttaccagggatatttcaggtgtcttgataggaactaatcctttctctccattatttgggagattgttgaaagttggaaatgagtagcatatttctctcttggaaccctggctggacgaagactccccagaagtttgtgtggaataatgggacaaagggagagagctgccactagaatccatctctacgtaaagctaaaagaacaagcactttgttgtattagtttccacggtagctagaataataaaactttagaataattaaactaaagtaatacatcccatctgatctagaacgtatataaatctgattttatggtaatcctgatacacaaaatagtgatgattctcagcaatataggtgagtgtgaccgtgtgatgtatgttgtaagataattgatgcgtgtgtgaaaagggtgttattttcttaggcatattccagctacatgtagatgaagcatcaatggttttcatgagctacttgaaattgattccctaaacgataagctttttttttgcaagttgtttatgtcatcacagttgtgggctttcctatttctatgattatctcaggaagctaagtatgctgatcagtaatcaagatatactttattttaatcaatacagcaaccggtgatgtttgttgtctaattatggaaattgattttcttttagcaaaataaaaaaaagtaggcttaaatgtaaacttgttcttcctgattttcaaaagctgcaattttgttcatcctattttaaaatagaaacattatatctcatatttttcaaaatggatcatttaagtctcgtttaaaatagtgatcctccttttatgaaatatacaattttaatctttctattaaatgcaaaaaatatttattaataaaaaattaatctaatatgacccaaatttaatgatataatacaaaattatttgtttaatccacatttcatatcttaactattaaaatatttttattttaaaataagaaaactaaatcacatattttataaaaatgaggattaaatatttctattttaaaataaaaaaattaaaattacagattttaaaaaataaaaagactgtgtctttattttaaaataaaaaactaaaattatgaattttaaaatataagaaaccacaattgcatttaagccaaaaagttaaatagttgatgcaccggatgtaaaggtttctatcatctaactacaagttaacatcgatctataataattagtaagttgattttcacgataactgcgcatagagattgaaattaaaaaaaaaatgtgccagatataattattattgacaaaaggagtgatcatgaaaagctcacacaatgaactccaaatggtccagcctagcaatgagagagatggaagagtcatgagagggtagtttgaggtcatccatttgccactttgggatttgtttgtgttttgatcatataaaaatgatgtgtacttattatgtatctagtgcttgctttcctcactcaacaaagaaataacaaacaaacaaaaatcaactgtgcttttaattgggacatttactcgttccctcgttttccttggaccgagattttttgagggtcatacattagtttgttatggtacgtggtacgtgccagtgaccatcctatatatatatatatatatatatatatgaaaaaaaggttcattgcgatggatagaattagctaggtaggaacaagagtagcaggtgtgatgtgctgtaattaaaagggtaagactaggtataagattgaattaatccagatattttgcaaattttaaggtggattttcagagtttttgctttaaatttgttaattttgggggtctttaggctatattgtagaatcgtctattgttttacgtgctctaaatatgaatacataatatttaactcaaaacccatggattttttactgtatcaaatataactttttgttttaacgatatattacttcattaaaatattactctcattggtttgcctggaattcagacacataattgaacattactatgagtaaaatatcaaattatttttaaaaatcaccataatcatacttagcatgttttatatcttacgaatatagttaacaattttacctacacagttacttttcaaagtccaaaattgaaagttttgttaattaagatacaatgtgtgatctaattcttgcaatttcaaatgattctatcctaatattgtggattaaaaaaatttcaagcaacaacaacaacaccaacgccttatcccactaggtggggtcggctacatggatcaacttccgccataatgttctatcaagtaccatatttctatccaaaccattaaaaaaatttcaagcatgaagataaaaacacaactctgaaataaaaaggctgcatgcatattaccacgggtgaaagaatgattccttgaagcaataacaagttaagcctttgtggctatattgtaattgcaatgcatgaaatggaaatgtttttggaattaaaaggaaaaggaaacatgtgcacccaatggcacccctcctatcaagcctgctgtatgaattattcatcccagagctgatcttgtcatctcataagccaagaagcaagctgcattggcaggaacacttcgggccattgcaggaccaaaacccttataaaggcccttgatcccctcagaagctgaaattcttctgaaagcatcaattgaaccagagaactttgggtttttgtaatcatctacttgaatcacactcttaacaacatcagtcgggtaaaccatgagccagaaagcagctccagccacacctccagcaagcatcagagaacctctacccagtcctgaggtatcagtgccacctgcaagtaatcgctttaatgcttcatatacaccaaacattgcagcatttccaggtacttcgcgagccatggtgggaaccaagcccttgaaaagaccttttacgcccccttctgacctgagaacttgcctggccacatccatgggtcccccatatttcactgccactgcagctgttccagtgccagctagcacactttgtgcttgcaatctgatattcacaatgagacaaaatcaataaatacatagtttgagtacttaatatgaaaaatggattcagttaaagttaaccaagactaatctgcagctcaattcattcagcttattctcatgactatctaatttcatgtcaaccaccagatacatgattgaaattgattacatgagaacttaaagaagaaacatctcttagaaaacaaggaaaaaaaaacttagttctagctagaaaagttattagttttcaaagaggtcaaaatctacaaaaaaatttagaagtagaaaaaagaaactacagatatagaagttgatagaaagaaaatacaggaaatgcaactaaatcatgacaattaaagcatcatcaatgacctctgacctgcatttgatcaattcagttgggcaagctagaaaagaaacagcaactccagctccagctccacaaacaacctgctgatttattgtgagggtagcaccgggatgcgacctcagtaatgcttccatttgtcccctaactgtaaacaggacagcattgaaggcagctactgtggcaagtggggctcccatacccttgtataaaccccttggcccttcagctgccaccgtctgcttgacagcatcaattgcaccagaatacttgggaagctggccggggagtggtgttggctggctctggagcttgaccttgatggtgtcaaatgggtgtccaactatcagttgtgctgcccctccaacagtcccagctgttaggtcctttgccacatctcccatctgaaaattcagaattccaagaatgaaaactgaggattaagacaagtaactgaacatgtgaagtaaaattactatcacaataaaatttatgattcttgagaaaacagctcatttaaagaatactggagaaaacataaatcttggtcatgcactttatctctacagaagcattgaacaggattgtatggtgtctgtttcttattaatttctttgtccgcatgaaaatgtgcctgaagttcaagtaatatatgatgttttttggggtaaatttatagccaagagaaaagctagacttcatcaaagtaagcccccattttagggcctaaagttttaagcctcattcacacccgtccataactgtgcaaaatctgatgccagaaataaatccaaataaattcctgtaatagccaatagtgacaacatctggttaggcttggaaggaaaggaagggaaaaagttgccggtatcaagatcaaagcttgttatgaatacatgcactaccttttctttaacttcatttcctttctatcgaaagatgcatgggaaaccaaaaaaggaaaggaaatagtgaaacccatcttcatgttgaggtctcagataacagtttttgaaatgtactcatgatcatactcacattgatattaaaaaaaaaaaatacatgatcacaccaattgaaacagaaaatggagacttaaaatattaaaaagactcaaataaatataataaaaatcaaagttataaaaagattatacaataaagtaaactaacagaatgttgaaaaatataacaattgtaacaacattaagtgttctcctacacaacagcataaggagtgagaacaaactgaagtaaatatttatacttccattcatgcatattctactctcttaatcaatgattcatgtgttgtagttgaatagtgattaaaaacttcagaagtgacagatgagaaagcatcaacagccatagagaaattctgcaagaaatacatgttcatatatgcaacacagagtatatactcatgcatcatcctttccagcagcagcaggttcgttttaaggttttcaaaagctcaacttcattcatattttatataaaataaactgaaaggcatgtcctgagatcctgcaaatacatcttagagctagaaccgtttttcttatgccagtcttatttaaagacatatgacattcaattcacatccctttgtgatcaaccatatacttgatgcccatggtccattaactctctcataggatatccagatacaacaaaaaagtgaaattaaaagcggttcaaattgaaacaggttaagcaaagtgacaatccatcttccactgtttttgcttcatagattagaaaaataaccacatattgcttacaaaaaaccattccttttgctcatttaacgaagcacccacaaattcacacacagcttcaagacaaattcccgaaaataacaacgaatgaaacacaatagatgcagtgacaaacgtatcaatcaagttaatgatcgtctaactaaattagattccccagaaattaaaaaaaaaaagaagctattttatcaatcaaacatcaaaggtagaatacaaatagagtttaaggaatcggatcaccatcgacacgtgcatttattcatctcaaaaaatgaactttagaagaaagctagaatgttaccgtgctttcgctggttcccaattaaatggatgaagaaagaatcaagttcaaccaacacttttgtcagaaaagcagagtgaagaaaagggtagaattgtatgtagaatagaagacgatgagagaggttttgattgaaatggaaggggttcaaaatcaaaagaaggggtgttaggtgaatctctgaggtgggtttctcaggtgacagataatgatccaaatgcaagacacacgaaaatagtaagagtcacagaaccagaacaaagttttgagagatatgtgcaatgcaacgcacaaatgcagagaggttgagatgacgacagaggatttgtcacaaactcactctgtctgtctgtctgtctgtgcctccaatgaatcacagttacaaaattatagtggacactctacacacacacgagacgtggaaattcaatttattttcatacaaatatttatttatgcaaaaaaggaaaaggaagattgatgtagtagtgactagtgagagaaaaaataatattaaaaatattttatataaataatatatcttaaaagcatgattaaaaaatttaaaataaaaatatttttactgagaaatagaaaattatattatttataattttttttatgtttttttatatttatataataaatatattttatttaaattttttaaccaagacagattcataatataatatgaatgtcaccaaccaatggatgcgcccatcacaaagttcacgaaataatacgatagaagtgaacttgtactattttcagtccaaatcccaagtagtaggtaataacttgatgtttggtccgttttaaaaagtaacgtgccatatttgacacgaattttcgcctgaaaggtagcaaaattttgatattcagtaataattacttattttatttagcagttttttatttaaaaataaattaaaataacctatgtgtcaaatataatataatgtgggaacatttgtgagaaaaatatattatgagattccaaaatcgcataaaaaacgaaaaatatttagtagtaaactgttgtttcattgtaaacagagaaactgaccacatgtttaattatgtggcaggctaacttagggtaggtttaaaatgaattacataggaaaaaaaacatgtaaattaaaattaaaaagcgtgagatctacgttaaatattaaatttttttcctcgattcatcttctcttattattagcaaccaaaccatcccttaacgtgcgtcattgaaagcagcgaaacactattttggtgtaacacatcactgcctcaagcatgcgcttaattgatatgttctttaactgaccaccactctaaacacccactaatattcataaaaagtgctttcaacaaaggaaaaaaagtgttagcaaaaaataatcttttcatgttaaatttaaagcaacaaattcatattcagaatcttgtatttatttcttcgatataaaatatacatgtaaatgtaaatattaaataacatttattaaaaataaacacagatttaaatgccatgccatgtcaacgaaaacattcatatcaagtttttctttttgttacaacatccttatcaagtttaccaacctcaatctcaaacgtcacgccgtttcattgctattcttggccagcatatccttttttaataattcttcacgagaaatgaaattctaaacattcagcaaattttttcttactgcattaaacacttgaatacatatttcaaaagcgggcgatattcgtcgcagatattttgtgtagctttttcaattaggagttgttttaaaaatcttgttattgattatatgtgtgttgtcttgaaccataggggaacatgtttgccttatttacatcttttccgttaaatgaattaaatactatattcaagaatagttaattacccgagaaactgtctttttcaacatgtgtttattcaacatatgtgggttactcacttgaatcaggttgggttttctattaaagtcagccatatatacaataattagtattgtggaaatggtaaggacaaaagaaaaagtaagagcttccaaaaaaaattgaaaaatacttcatcctatctataccataacagagtttcgagcaatccatctccacctcaagtcctagacatccttttttataaaaaaaatatttaatttaatttgtatatagattttagaatggtaatacaaatctcatacttaattgagcatatttggaatttgtgtatcacatcacactttttgataatggtcttcaatttggtttctactcagtcttttcgcaattttcctgttttcattattttgtcatcttattctttctctctatagttgatctcatttgtagtaaaacaaagaagtaaagaacaatgaccccaaattaagaaactgaaagctgtgaaattaaaattttgaactcctaatacagtaatatattaaaatgtaatggtaatgactttctgtaaaaaagtgtgtttgggggggtgataccgataactcatccttaaaatttgagaggaacatcataaaaaacacgaaacctgctttgggaaagtgcacattcccagcacaaagtaagacttgataattacaatgattacaaatttacatagaacaaattgacaggtgaaagaatcagcaatcagcactcttccaaacatatcgtaaagcccaatatcatttttttctttttcaacaggattgtcataccacttgtgatcagccccaaatgtgcatatatgatattcacatccaacatagtatcaaaccaccatccaccattttccatatgattggtagtagtagtagtagtaaatattgggaagcaattagaagtccaaccataaatgcagatgatagaactccatcttgaaaatttttcaagttaaaaaacccctgaaatgtgaaaaatcatggtacaataagatgacaatgatggcagcaacgatcaataataaaaagagggtttagcagaagcagagcttactgaattccactgccacctctgcaaataccagaatcagtgcaagttgcaagacttccattgacgccgttactggctatagctcctcgatccacatagtttagcatgtgaatgagacaaaatattataagaagcctgaaatcatcacaccaaggagcaaggacaaaacacttgtgaattgtaacatagtgaatcaatcatgtattactctgaatttcatttgtaacatagtgaatcaatcatgtgttattattattattatttcgaatttcaaaaagataaaaggcagaatgaaatgcaaagataggtttagtgaggagaagaaggaacttttgagcgtaaacaagaaggattgggactttgacctgactcagataccattttggcagcttctccttatctcagattattattatggattttaaaagcaacagtctttatataatagttgaagcaagtctctgtcttcgttcaagtttcctttatttcattcatttacgtaatctttcctccaaacttcaaccgccctataattcattcatttccttccctttttaaatactaatagaaaacgttccatcacgttcttatcaaatatcgcatctaatcaaataataataactaatttttttattacacttaattacatttttatttaactgtgaaatccaaaactagattagaattcaaaaacttaaccacaaattaaaagattagaccaacaactgttgaaaagaagggtaaccaagattaaaccaactcacggtttccttcgtacccatatcatgttcaataaaaaaaaaacttaaaaattgaaattcaagttaaatttaaagaatgaaaattataaatatttaaatatttcaatacattttttatcattgtaatttagtgtttttttttctgttagtaattttttttaattattgtaaattatgtttgttttgtttttgtctttaaagccttttagataatacttaaatagtaaaaaaatattatctaaaggatcttttaaaatataattttgaaggactaaaaacaaaataaataaatttgtaaggactaaaaagatatttaagtctattttaaaatatcaaaatgttatttaaacatattatttactcattttaggcgtcattttatttcatgtaatgaaaaataaaacttttaattttctaagataaaacattcaaaaataaattaagacctcacactaaataaacatgatttagaataaactaaaatctataaaaaaaaatatttaataaaaaagctggttaaatactaatattaggaagtgatttatttttttaaaaaggacaattatattttaagttgagttggaattggaagagggaagtgtgaataatttcatataaatgagttactttaatttaagagccactaggaagtgaataatttaatttcatataagctgtgaaaaaactctccctagctactcaattaaaatatttctttttaagtttgatcctcctatgaactgacttactttatttttaagagtttcttatgaaaaatatttgactcaacttttccattttaaggagaaaataaactaaaacaaacaatctttatactgaaagtacatatacaattaagtttatatttccacttattttaattgatttttaatttaactagtcaagttttgaatgaaatcttaattgtatttaagattttcaaactcgaaagtttccataaacgtataaaattaactcgtaaattcataaaaattcacataataaaaaaataatattaaaaaatttattaatgacatatacacttaacaaaatactcttaccacaacaataatttagcatttgaattacataacaaaagtcaaataacaaattacaataataaaatataatagtacattactaaataatatcaaaataaataactgactaaattatatataaattaataaaaatatgttattaaagtgaaaatattttaaaatgagtcaatttcttcaaattatttgagtcataataaaacatagtcattgtgaagtctatgaagtgtaagaatttagttattttcaaactcattgaatcactatttaactcgagagtttataaaaaagaatttattaaaaagtgaactcattttgtttgtataggctcttaaaatcgtaagaatttaagatttaactggaaagtttaataatcatgattgtatatcatttttttttatgattatgactttgtttcacataaattttatgtgtcatataatcaacactgcggtaaaataaaatatattttattgcaaaggggacaaacattgataatttgttaagtcattcaacttcttgataatgtatcgtaatttcattattctgcccctaatattaggctgccaaccccttcatcattctaattgtgacggatcttccttgtctcaccccgcatcattattcattttgcaacagattttacaagacaccaatttttgtggagctattgacttgcatataattaataactattcatccatatctcaaaatactaaactaaaaatgtttacatgtatatatatacatggatgatggatgtatatcaggtccatttcacatattctttatagcagagtaagcttcaacgtgaacatcgtagcattcaccatcccatgataagtcatgcgccattgcttgcattatttttcgtttccacatggcagggttagtcctctacaggcaaaggatagtcatttaataatgtatcataagcacatgcatgatatcttttctaaaatagagtaaaacttatacatcgatagtgtaaaacaattttatactttcatccaatcataaatcacgattgatatgacttttacggtatttattgtaaaagtcaacaaacctatcatgcatgatgatttgtgattcgacgatagtgtaacattattttacactattagagcataacctttttttctcaaaacgtattaaggaaaaaccactggaaactacatacaatttcatcaatggcaaggctaatagacatgtttacgaagctagagttgattaactctgagtacttagtggcctcgtggtcttggtttatgaagctcctatcaaaaggtatcgaccttgcagatataaatgaaatgagtgttaaacaagtatagagaaaaaaattcatccatcacaaaatatatttatggcttacctgtttgagctagcatcaggggcaagtgctattggagctgctccataccttaaagcaatgagctacacattcaagttataaaaattgtataattcagttgaaatacatgaaaatctccactcgaaacaaaatttgcttagactgcattgtttaatactacattgcaaaataaataaggattgtcagcatctatagtctataccattatcaatttccacagtggcaatacttagtgtttcatgaagacaacacagtcttatagaaactttaatttcttttagaaacaagcaacttcctagtagcttggcagccaaattgaattcatacaagttttacttgaggtgctaaattagtggaggaaaattatcactagagtggatggaatggtcttactgggatttcatcagtaggatcaagaaaagattggcacaagatgatgtcggatccagcaaagactaaatgcaacagagcttcatcataagtaggcacaaatttaagattatcatcctgcagagttgaattggatggcaagtcattagtagcagacaaggagaaacaaatataacgaaggttctagaacatggaagtgtatcgagtgagagaagagggtgtgagaggactgaggagtacatctcaaccatataattaaaataaatgaaacaattttgaccatttctatatggttctatggtcaaaactaactcttctcacctctcatgcactcactggatatgtcccttttaggacataatgtcaaaataatgcagctttacgagcagataatttaaattgaaatattcattctgctgaataatgagtatgacaagatatgcccagacaatttgctaaaaaaatggagccaaaactgctaatactcaatgatttgccacaggtagcatatatataagcaatcagtaacaagggattacaatattaaaaacaaaagtgtgggaactaccttgaattccgtctgaagtgattcaggcgcctgattcatgatcaatctttcactggtccccataaatataaactgcaactattccaaactggtttcaaacaggaaatcctctgaaacaagtatttctcatagccagattcatttcatacaaggtcgatttactttgaggttttatcacactttttcttcattatggaaacaaggaacaataaagattatgtttctcctataagcaaacagataaaaattcatatgcaaactgctgtatttggagcttccttatcaatatcagttaatgagaaagtcttataagcaatgaaactatactttttttgagaaaaaacataagtataagctccacagagatggcaacctggacatcatactgcttagcattcaagataacttccttcaccctttttctgtcaaggtctcgtccttctgaaaaaatgcatccaacctgataaaaatttcaataatgagcagaaaagccaagtaaaaccacatctactcaattcttgacatagtataccagtcataaaagtcatggtttatgagaggtagctgcaaaaaaaaaaaaaaaaacacccttaaccattaatttcaccaaatgaagattcataaaaaataaataaatgaataatttcaataaaaatggtgaagaacttcccaagcatgagcgtaggaaggggggacataggcacaagttgttcatttttcccttggccttttttcattttggagaatccctcatcttcatattccttgtaatttcattctctccatcttgatgaagttcttcttttatcaaaataagatgttgtttgcagttgtctcacccacattagtatgctgaatttatttgccattaggcttgcctttgacatcttttaaactgtgttacagagttatcacattcatattgtttgctacgttacacttgtatgttgcactcaaataataatgggtttttgtttctagggggaaattgggagcaacctaattcatcctctcttgtgtttgcttatattaccacgaatctgtcctagaggtttaagcagaaattcagattttgcaggggtgaatttgaaactgtgcttattctataatgtagatttcaagtgaagatccaatggacacaacgcaaaaaacattatattaaactcttgcagaagagaaagtgtgaggaatacacacagaaaactaaggcataaagatagtcatgcaattatccaaactaaatatttcaacaatgctaaaactatagttaacaaaaatgcagcttaaatatattgtatacatcctgaaactagctcatcatatcttagatgggaaattttctaaaaaaaggaattgcatataaaattaatataatagatcattaagtttctcattgcatatatttatcatgggccgtggcaaacaagtaaggagcaagggatgatccactcacaagaatagtagaagaatgttcagataatcccagcttctgtagcaatgcagctttgcaaaaagcttttccattcatattttcagcattgaaattttctggaagaaaatagtcagttgaaggatcccaagttgatttgtctaatccgtaaggagcaatgaccaacttgtccctgcaaccaaatgtaattttccaaagacaaaataatccatcatcaaacgttaaacaagatcgaaagtatgttatgacagcatacttacctatggacatttaaagtgggctccagttcatgactcaaattatgaacaattacgtgctttggatagatagatgacattattacaactctattcgaatagacaactccaccctgcaaaattgatggaagacttcaatgttggacagtaataagaaaataaacaatctaaaaataaaagactttgtggttacgcaacatgatgtgtattcaatgatttaatattgcaaattgaggggtataatctaggggaaatttgtcctcttgttttccttcttgaatgcaaggcaattatttgttgccttattaagtgtcaaaatgataaatgtataatttgataaggaatttcacaatttccaacaaagtgaaactaaaataaatgtaaactcaagatcacaatcccctccccccttccccaactcccaaaattaggaagaattaaatccatgtcactgctctctagaaacatatataactaagctttactcctagacacaaactgttacgattctctaaattcatgagactggtccaaggtggtttacgacttcctaagtgtcttcaagaataagggaaaaaataaagtaaagctagaaaagaaagctccaatgactttttcaatatcatcttgcaattgttatagagatgaatgtaagagaaaaataaagaatacaagagtaaagaggatacctttaaaatattgacaagttgtgtgttagtgttgtcttgtaaacgatcagggcgatgaagtcttaaaggatcaagcccacataaggctaacttatctggttgctcaataccctacagcatgcacagcacttccaataattagaagactgacatgaccaaatgtaaacataaactccataacaaactatatgtaatttttccagcaaatttcagctggaggaaatatcaaaattgagaaaattcaacacaaaatgcatatccaacagggcaacatctgttactagcctgtgaattgaagccatggcatgtaaataatattctggttccttcaagtccctaaacaaaacaaatgaataagtgacaataaagatttgtgcaacaaagcaatataatcttccatatttaaatcatccttgtacataacaagaaaaaatctgccaaatttgttttctttaaaagacaaagctatttaatggcaataaaggataaagatggttatgccaccagacactcagtgcagcttccaatcagctacaggatggagaaagtagggatatgctctccacctcctgattgatgaagaaaaggatcacttgaaacaagactaaaatattctgaataatgccaagaaaaggactacaactaatgtgggactgttacaacaagatcctccaagataatgccaagaaaaggtaaggtggagtcaataagaagaacttcatgattacatctacagccttttgggaaaacaaataacaagactttgaactttcaattgtcggattgtgtgtcatttgaggccattggaattcaatttccctttcattgtttattctccatgaatcaaacggtataatcaattgttaaagtttgtgtgtcattattagctggagcaaaatagcttcacgatgagtttttttccctcttttcttgtttgagttattgtatcacctatcattgccaatactcttggtatcttttatcccatttatagagactttcaaaccaatagataagatttacaaatcaaactaaataaaatttaaaattaagaacagacacctgtttaacaaatgtatcccagaaaaggggcccaacaatggctgtctcccaattatgtagatgcaacacatcaggctgcttcccacattttacaatatagtccaatgatgcccgacaaaaataggagaacctgatggcaaaaaaaatcatgtcaagattattgaaaactatgtacaccaaagtaaaaaaaaaaaatatttgtcacatgtaattatgtatagtatagaatatcccctaattgtaattggtattagttttccttctcattattatatacagatttgtagcctaaaatatctagtttagcctttatttcatctgattttcatggctatatgtatgttgtacttgtacctactgctgtaaattaatcagaaaaacaatttacaattcatttctgttttaaaaccttaatttgatcagactttactttcctgtcacttataaccagaaactaaagtacagataacattgtatctatcagagtatctcttttatttctctctttgaagatactttgagtgcacaaaaagtcagtcataatgggtttcaaaaatagtatgttgatatgcaaatattataaaacattttccctccttttaacttctattcttttgacctttgcaatttgttaattaactcatctaaatttgttgcaacaatggcagcactctgaagtctgaactatgtattttcaagctgaaaaactcgcatgcaaagaaaatatcctgccttgcagtctctgattttatttcttaactgttggaaaatattttattgcaaggcattttctctctaaggacagcgcaatgcacttcaacccaggcttctctaaactctcctttgttctattttttttctttgtactaattaattgtttaaagcatttatgtgttttgattctatgtgctatgttcgttgtttctggcttcctaatttttatctaacattaactttatcaattttttttttaaacaagcacatttcaaaatcatctgattagctttttatatgaacttcaaaaagtaagtttttctttgctttaccattataacatatagaaaactagataaaccaatcattacagatatcaattcactcacctttcaaaatcatctgggtatccatatatcatctcatggctgaaaaatgatgaatagtactttggctctatcaaagtgactccaatgccaaaaacaacactgccacacaccaagagtaagtatagaataaatgaaaatcagtagatttcaaataaggaacaagatgtgaaatattatttctactatctttcattaactcttttgtccaccattacaaattatttgacttccattttatatgcagatttacagtaattaaacagtcaaagaaagccaaactaacccagtccaaattctatttccgtgtaattggccattaaaatacgaggtaacctctacattaacttcgtgcaacccttgcacctcatctaggtttaaacttgcatacctacatgaaaattagatacatccaaattaaggaattataaatatcaagcaactattagactaatatataaaatagagaggacataaatttcgtaattactttggcaatataacctccaccaggtggccctttctttgaagtgcacgagatatgccggtcacatatgaagctactgatcctctagggaccaatggtgtcatttctgtgcaaatgtgaacaatatgaaaaccattcctgaatgtagttgatacaacaaaggacaatcagattttaaaaacttcatctgagaaagaaaaactgaagaatgaagatagtaacttattctaccatttatgaacagaaataatagcctaacgtgaagacaattaagaatctataaatggtccagagcatatattaccagcataaacctaggctgagtcagtatcatattatacaataaatgtattactgcttatacagtaagcgtatacatttgctaattttatgcctctctgcatgctcagttacttttcagtaatttgagcatgctacatgctgtatgccactaacacaacaaacatcggatcattcactgagagcaggcaggatttactttttgtgtccatctgaaaagcgacgaagttctcctagaagttcaggatcttttttgtgtgagatgatattaaaaacatcagccagactcactttgtggttcatcaccaaacttcttaattcagatgcttctccagcactaatcatgctgctgagaaccatggcatctatccgaagcagcaattctgaacaagttgataggttatctgggttacaaaatacaaacagaaacacatagttcaattaatcatctagggcttcaaagacaaatttatcattgataaaatcagattaataatagattttggttaccatagatttgaaaaatagcattcagttcaattatgttaacacaaatatttgctagccattatgttaggattcaatttatgggacttgagtctcacattgaaagtatgggatttagaagtggggtttattaatccttgggttctccaactacaacatccagatattgtggtgtggttctcccaaggttcttatcaattggtatctaagtcttccatcatgtctctcagctgcaaacgagtggtgcgggtggtcactagcattacagttttttcctgagacaagtcaaagggctaccaacccgtgtggactccaggactgcaaagtgcggtgggatgttaggattcaattcaaggtatgggacttgagtcccacattggaaagtatgagattccagtatggggtttataaggcattggactctccaactactgtagtcaatgagtagcttttgtggtgtgattctcccaaggttcttatcactatatataattcgataaattagaccacgaaatgaagggaaaaaataatagtaatttaagtaaagggaaagaaatgtatttcttaatttaagggaagaaccaaatgtaatcaaacatgtgtatacagtacagaatcatgtttcaatagtatgacagaagataacctagatgctgctaacagaaaatgacatgcatatgtctacaattgaccaaatatgcattattaggtacaaaaaatgcatgctattaaactatcaccttttacctttaccagcaccagcctgtttttctgcttccaacttctttatcttactgagaagcgactgtttttctctgtttgttttgtcaagtttctcaatggccccaaggcgttgtttgttcaagtatagtatgtctacatgcaacgagaaaattcaccagaagttatttaacactcctctacaaagcacaagtatgactcaggtgaaagaactaactctgttgagcttctttgaacaattgccaaatattatcttgtttcacattctggtcatcatcacacatggactaaaacacaaaggggaaaacagtgagaagggaatgaaatactaatacttgctaaatacggtaaagggagagtaaaaaaagggacatataaaaacacaacacttttgaaactaaagcaacatacctgggacatgtccacatttttgttaccctctgacctaacatacaaattcctaacttagtttccggctaacctcgcatttaaaattttaaaaagaaaaaaaaaagaacataaaagaaaaaaaggttacttctgttcatgtaagctattgacatctccattattcctgaaaaaacagcataagaatcaagcaagagaaaaagggtaagccacgaatcatttgtgagatgaattatataaattacgaacaatcaagcaaaagggactatttttcagtctatggggcaccaaagttagattttgaggacaccccactaagaatatgatagtaaaaaacaaaaaaaaaatgagtggtgaagatagagaggatggagaagtgggagtcaaagcctgacctcaaacaagaaagaggaggaagtgcaatgggttttggcatggaagggagtgaaaagtgaggaatcggtgaatggaagaaaaacaatgtccccatattcgcttcaggttcagaagaaggaagctatgtcctgaagctgctgcaagtgactgatatcgcaccacagtcacacccgtgtccatgataatgttactctgtctctcatccaaatcattgtttcatgttgaaactacaaccataaagacaagacaatatgccaactaagcaacacgtgtccgctcatctcatgtgctgcctgagtgcttgtgaatttgatttgatcaatgatcacccccttaatgttaaggcactttgcaattctttacttggggcaagtgggtcaagtgtaaaaaatagaggaaaattgatcttgcccctttagaatggtttttcctattggtactcaccacattctttcgggcaaaccaacataattaggattatgttattttacataaattgttatacagtaaaattataattttgatgtgttccactaacacaataaaattgaaattgtattgtataatatgaatttcgacaaaataaaattatgatttcaatgtataataatttatgcaatagaattatatttttgttgtgtttttttttttcaggtaaaaaatgaaaaactaaagtttgattttattatacactatgcaataaaatcatacttccctcgtattttcttaattgaccccacttgcacaatagaatggtgattttattgtgcacttttttcacacatccacctacacaataaaaacaaacttaagctaaactagtgggaatatgaaaaaaagaatacaaaaaaattatgattttgttgtacaatatttttcacacttccactaatgccacatcgtttagaagatgtttaaatgaatagtcgtcttacaaaaattgtcaaagtgagtaaatgtctatgattttttttctcaaaagataaacacaagtcactcaagtgtagttatagactatagaaagaaaatatggtacatcattgtgagactttgtattatatttgtcccataaatctatttgactcattcttactcgtctagttaattagtactatatgtattaacaaaatatatatatactttttgtacaaaatttgagcattttatatgtcaacaactcaaagaaaataatattaaaacataaatgcaaaaaaactaaaaccaaaagatattgttggtaggcatttcatatcatttactaattgaattatcatatgaactttgaatcctgaatagggatggaaatgagtcagaccgtcttaaaacttaaaagacataaatcatttttttaaaaaaagaaataaaatatgtatttgacatatttaacttgtcttgattcttatttcctatttattttagtatttgacattaagactagattatcgaatgaaacttatggtattttacttaacttattttgtttacaatattttgttgaatacttaaagtactctgattataattcttacttgagatgttgtaattagtgaactttaacctcatattaaaatgctctaattaattttaacttatttttttcatcacaaattaaaagggaagtatgtgtctttctttactcatatacgaatcctcaaagtttgactgtataatcattgagtttccttcatatataatatttattataaaatagatttttttaataggcttgtaggtcaaaacaaaattttaaataggtcagatcaaacctataaaaaacttatgacatgtaaatatatcagaccaaactttatattttaatttaggccaagcccaagtctgatcttacctgttttcattcctaatcttgaaaaatgtatgaaacaattgagttgagattttatccaatttgtctccaaacatgggtggatctacaaactagcattcgggccttgtcccctaatgtttttcaatctttattttttattgttaggtaattattttctttagagaatttaagtatgtaagcaatatcaattaagtattatttattatttttatattttaataaaatattttatttttgtaatatttattgcaaatataatttcaatttttttcttttttctagacaaatatttgagaatcatttattgttctttcaaataattttctcttataatatgtcattgtaatttgttatcaaatgattttattaacctttcttaatggaccaaactttacaaaccctatatataatattgacaaccttaaattttgaaacacaccaacaaatattccatcttttctatcaacacttttttatatctctttatttgtttttcttgtcttttctttgttcttaagcattgactcttatcattgtgaggttccactatgttttcgatcttagtgcatggatccaaactagcgtgctatgaaaatctgaaaaaagaaaattagatattaagttgcactaaatatttaccataatttgcttttaaaggttgtagacttgttacgacaaatatttttcttctttaattttccaatttgctgaaagtaaattattcttcaatggtaattgactattattatcttaaaagataatttagtgagtaacataatttattcaaatttaatagggattttcgtaagaaagatatagttaaatataaataacaattttcattataaattcattaaagtttttgatgagatatgaagttggttattgtcatttgtaatttaaggtctttagaaatatgtttaatattttcttatgtgaatgtactctctattatatgtttttaaatcattttagaaaatatataaattcattaaattttagaaaatataagttaactttaagagtagtgcatataaatttttacatataatttcctggttggggagttctctgtcacgttaaatagttctcttgttcacaacattaaattagcgagttatactaaaagtagtgctatatacctatatcctcctagtttctcctacaaattccctaactacttttttttttttttacggtaagtatgaataaaaagtaaatgtatttaatatcatgaaaatataaaatacatttaaaatttaccataaatagtattaagagaatttgtaaaaggatgaagcaggaggatttaaaactattcttgtgctaaattaaactagataatcatttgtccctatgttttgtttgttgagaaagtgcaacagaataaaataatttgcattgaacttcgagcttgaattggaaaccaatgttcaccccctcttccccggtatgcattataattctagtggcaacgagaagagagcaatggcaaacaacaaatggtggtgtgatgcagaagggaacacttgtgtggtttgcaacaaatgctagaaaatgttaaggaggcgccaaagtgaagaaaaatgtaaatgtaaagcctagaaaataaacttcatttttttggaggaagaatagaaatgacattatgagcccaaccaaaccaatggtacaatattttattctaaggcaagattttatctaccatcctaacattaacattcccaaccacacaacatgttacataacattgtctcaaaagattggaccagctgcgagaatctcttctgtcaggttgttgttgcccttgccaatcttgtagttggtgaaggtttcaaaattgttcttgaacaatccagccaacttcaatagtgtctccttgtagccctttttgtttgaccactgcaatccatcaaaaactccaatgttaactaaacaaaagaccatgtcaaaggatagaaaaaaggtagatagatagctctaggataactaacagtgttcacagggtctagaatttctgaagggacaccctccacttcggtggggatctcaagcccaaaaatttcagtcttcttgtactctgcattcagcagacttcctgagtgaatagcatcaatgatttttcttgtgtattgtagtttaatgcgacttccatagccatagctgcattttgacatgtgcgagagtttggtgagttatagattttatagggtacaagttacaatactatttagagagaaattctatttcaattttcaatgacatatttacatacctgccagcagaccaaccagtgttgacaagccatccggtagcaccatgcttctgcatcttttcagcaagcattgctgcatactttgtagggtgtagcataatgaatgctgcaccaaaacaagctgaaaaagttgcctgaggctccttaataccttcttctgtgcccgccacctaaagttattacaagtaaaagatggtgagaattacagaagaaacaaaacaacattaataaatagtaaggtgggaatgaagctaaattactatgaaacattaccaaagcagtatatccactaatgaaatggtacatggtctgtgccaggtttagcttgctaacgggtgggagtaccccaaatgcgtcacatgccaaaagtatgacattctttggatgagggccaacgcaaggtaactttgcatttggaatgtactctataggataagcagcacgagtattttctgcaataaaaattaccatgcaatcatataataatcagcaggattctcttgtaacgaatgattacaactacaaagctacatctacacgtagcacctcaaaaatcccgtcaagttttgtcctcttgcttgattaaagacaaattaatgttcttattcaattgttttatcagtcacacgcttgtcactttatttaattccttccttatctcttgcgtatatctggaggtttatttttaagaattgaccttttgcattatataatagattagctgttgcttctcaataacatcttgcaagtattaggacaacggttcattgtcaagaccaagtcacagcttagtcctattgctgccagctatcgagcaaataatttaattgaaactgtccatgtcattacacaatcaaaattggggtcaacctttaaacaagagaatatattacctgtaactgatttgtcagagtaatcaacttctcggtcgtgctcatcaaacaccacgttttccaacactggcaatcaattgaaagaaaaatgaattttttattaggagatagcaagtgagagaaaaataaaaagtcaaaatgcatttgggtgatcaaatgaattaatacctgtgccaaacctgattgcattccaaatatctggctctttctcccgtgagaggtcaatgcatttggcatagcaaccaccttcaatgttggagacaccattgtcaccccaacagtgttcatcatctccgattagatacctattgtgatcggtcgaaagagtggtctttccggtacctaaaacaaacaataaaaaagagaacaaaaggatccattaggattgaatataaatggagacacaagtagccataacacaaaacatccatgtgtaagcatgcaacatagttgagataattaacaagcagtggagtattgagtatggctgagtaataagaggggaaggaacatatggtagggtaggtgtgtggagccacattataccgattcaaccggtgatcggctgatactatacctgagagtccaaagaagagtgccacatccccatctttgcccatattgcatccagagtgtagggagaggatttggcgcttaggcatgagataatgcatgacaccgaaaagacccttcttcatttccccggcgtattgtgtgccgaggatgaccatttccctcctagcaagattaagatctatactagtggaggatgtcatgtagtgagtataacgattacaggggaactgtccagcattgtatatagtgaagtccggagtaccaaaattctccagctcttcaggagtggggcggatacacctgtcacccacccagttatccactttgtacactaaactaaactagcatgcactattttggagggaaccttttcctccactttcatcagggatgtatgtatattatgtacaacattatatgtataaattaattaaggctttcaacgatagggcacttatctggcggggggccttataccttttgtctggattgaaggaagaagagagaaacaattgcaactagtactgttggcaatggtaaattattccttagttttcacttacatgttgtgcatgaacaatgaatggtaagctctggcagagacaatccggactttgattctgttctctgtgtcccaattcaagaattggtcgttgacgaagacctgcacatcaccattgttttgttgtttagaatactgctagtaggagttgccatccagataagaacagatatgtatgatacaattatacaaagtatatttgttgtttaagcaacaaattggtcattgtccattgacttagacatgcaaatcacgtacgttgttattaattagaacactacgggttcgcatctccatccagataagcttagatatgaaattaatgaagtatttttatcttttaagcaaagaataattgcctaacaactctcatctatcattcagcgaacgtccgggatttcaatttttaagctcatctaattcgaactaagtcaattaccataaatatttttattattattttactgtaaaatggaatttttattttttagaagttttaatcaataaatgatacatatgctttttagactatcaagtgttaaccaatcaatcaaatcacaaattattatatatatatatatatatatatataataaaattaaatttgttaacttttataataaatactttaaaaatatattagtcaccataatcatgtgatgttggttggacttgttcatattcattgaagaaacatctgaacccaacctaaataaatctattttagttgaatttctattttgtcctaagcaacaccacccaaccccctaatcagccaaattgtatataaaagacggcagtgtttggtgggggccgatagcattacagatatgaaggaacagttggatgcttcttcactaacataaaaggacaagccacgccacatcacgggcttcagtgctctatattgtgaaaggacaagcatatatccttattcgttcatgaatccttgggctgaacaattgtatatctagcttcggtttcttaacccatacccataatagaaagcaccgctaaacaaaaacacgatccaatcacccaattcccaatatgacgacagtgtcgtgttgcctaaggaatcatgcaactttttgctcgcccacccacttggacaaaaagacaaacttagcaccatccccatgtcaccatctttaaaagccaaagatgacatacaccatcctctctaattatcgtggtccattctttataaatactattaactaaaagtgatcgtcacatttttctatgaaaatttccagtgtttcaaaatcactggtgcctgtctttcagttacaatttgtcatgcacagtaaattccttctctttcttaataattatcttataaaaatactaatatttacgtatttttttaattggtttactgtgccatttttacactgttaaagtgtataaaaattgaacactagaaacattggttaaagaattactaatgtatttttttttatcatatactaatattccaaagtggcatgttcttttcaataaaaacaagggatgatataaaaataacaaccaaaaaagaaagaaactacgtaccttgtccaacgagttcaagtaatcaacagctctttctctgttcaccatgaaagtgtgttcgtccatctcgatgttaggggaacccctgtggagtacaaaatttggcaatgccgtgtctttaataaagacatataaaaaaacacataacgtgacagagaaatataagccgcaaatattattatttattaactattgcacataattgagtagttgcttaaacttagtactcactttccccaccaaagctcgttctcagtaagatcatccttgacgacgcgcttgtcccttggagagcgacctgtcttggccccagaaagtgttgccaatgccccggttgaagtgatgaatgatcctttctcatacttaatcgcttgttcataaagttctgcaccaaatatccaaaccccccattaaataaactaaacttcaaataattaattatatggaagcattagtcaaataaatttctattaggcaagatattatatgatttcatcacgtccatcacatgaggagtgggcttagtgttcctttcattaggaaattcgtgaaaattttgtcggccacaaaatcatgggatttcctaatcaattaaattaaattgaattaaccagtaaaaataaaagttgaccgctttagtgggaataattagtatttgaatacaaaaatcgaccacaaatttgatatatttttattacgaaaaaaacttaattttctagataactatatgatgaccttgatcgatcaaaaccaacccacaattaaataacaatagtaaataatgagaattaaacatataataaagcgttatgcttgactacttcaaatgcattatccggtggtgttgttctaatttgaactaattttcgtacaacacacgtacaaaatgatgataacatcaatttaatttgttaattggaaagaagaacacgaccaagtccgatgtaacatacgaaggagactataggccgtaatgtcaataatagaaaaaatcacataatcacaatcatatcatcatataatcataaaaatgtaagatatgaaggtttagacaagtgagtaccagctggggagagattgtagaggacatgggtaaatttcaaagaactgtcgctgacaacaatggtgggagtgctgacatgatggtgcacgtgagtaaccttctgggtatctgacttcctagctgggtctcccttcaccagtttcggtccagtttctctggtcagtgatgccagagatgcactgtttcaacatcaagttaatgtgattaataactttctaccaaattataatagtgtttcaaaaaataagcaattttatattttttaataaaacaaaattagataaattaggtgtcagataaataaaatcaggataaacagccctaagactccaagaacacttacgaaagtattaacaagattcttagttttttgcttactgaccagatattttaacgtaagaaatgtttcatttttaaacagaaccttttcttttcatcaatttttcattatattcaaatacagacaataaaacattattaataaaattccatctgggccaaagccaaattgagcaaaaccgcaaccgcgagaggccggagattagacgctgatcgggtcccactccaacaaatatatgatcaaactctttggcaccgtcggattcatcttactttaatagtcatggcttacaaatcacaatacacgtggtttaggtatctcccaaatagtatatgcactggccccactacactttttccttacatttatttctaattgtgccttaaacgggttttccgcctggccgtgttgactattgtatctccacattaatttaagcatagataattaatgataattttatttttctaacaactttttttaaactaaagaagaagaaaagaaatgtgaaataaaaaataatacatctcttattagaattaaatttttacgttaataatttattaaatttgacactatatttaattgaaaacaatattaaaaatctttatgaaactgtatttttttttataaaaaaaagttacatattagaaaatacgcgtttcactcatcatgtagatatggatgtgaaataaaaaataaaataaaaaacgggcacaattttttttagcatctatcccagctcttttctcattctctttcttattttacggagaccatataacattactaaacgttataaatgtcgcaaagaaatatattatatactgtacatttctttggttaattatagaaaaagaaaattattatatacctgatggattggagttgttgcttatgacgttcttcttcggtgagggtggcgaaaggagcctgaaaccccgtaacgggggtggtgggtgcggatttcttcttctgcagcgagtgaagctcgtcaatggtctgagccttcaccgttggaccgctgtcgtcgtgacaaatcccgtcatgcttcttctgcgtctgaatcttcgcaagtccgttcctagcgctcccgttaccgttcgcaacgctgccattcccgttcgacgccattttttttctctgccaaaatcaaattaacgaacaacataaaaaattattcatagcaaagcaaatcatcagtaaatataatttattccatcgtcatacacatgcacggttcaagatcaaagtagcggctatgatagatatacatcactagtgatgaacattaaataacaacaacgtgtccacgaaggaactaactagagaatttggtattttttcaaaaacagtggcagttggatatgacggaatgagttggtctcccacaacaacgtgatgaatcaaaactcgaatttcacatgaagagattttcaccgtatttccagctgattagttctgaacaagaaaatatgggaaaacaaaaaaactagagaaagaaaactgagactaaccagagaggttgattcgcaggttgctactgcggaaatgaggaaaggtgtaaaactaagacaaaaacaaaaacagctaatgtgaaacaaaagaagcgaccatgggaagtgcaagcaattagcaacgttacgttgttgcgttgcaagtgtgaagacgaaacgagttggtgatgggaaatttacgaagggtgaggtgtccgttttataggcttcagtgccaccctaccttgaccaggcttaaatggttaaccatgggttgggttaggataaccatggttaaatcctatcccccacggatcacctcgtctacgcacttttttttttttttaacaaccaaaaacagatttttatttaactattactttgtaacagtggtgcctaaatcatagtacagcaacatgttgccgctaaacaattttagccccacatgcataacctccctcatccatactataatataattcattctcaataaacaaaacatgtgtatccaatagttatcccaatgaatccaattcctccaacaaatccaaaattacctatgcaaactatgaaacatatatgatatttatcctgcaagttgtaacaattaccgtgatgatgctaacaattactatgtaactatgtaacaattactatgaaacatatatgctaacatcaggaagccagggtttggatataataattatgattcacgtacaaatcataaaaagagtaggaaaaattctttactttcgcagaaagccgtgatgatgctttgagccatattaattccactgatacattaaaatccatttgtttcccttcaaagacaattttatttttgtggcaccaaatgaaccaagtcactgcacaccaaacagctctccacacgatagttttattcctatcgagccgaaaataattatacataaaaaatattcattaaaatttccttaaaatattatttgttcttatcttttacataaaaacaattaattaattcattaataaataaccaacacattaaaagcaataaaataattaatattaaataatagtgacatgaatttgaattttatttaaaactatctataaaattaaatgacttaagtaataactatatttgatgatattattaacatcacatatgtttcatgagttacttaaaaataaggttgcattagtattttagtcttctaatttttaaaattgattcatttattttttggaaaatatatattttgtgatgattttaaaccacttaatgataaattagaggaccaaaatactaatttaacccaaaaataaatagtgtttgacaatactttgcttaaatgagtttttttatataaataattgcttaattcattgttactaattaaagaatcattttttaattataaaatttaatttgactaagtttagcatttactctaccaactttagcattatggtaaatttttgtataaaatttttaaatttatatgacattataggctcataaatttaagataagtaactcatttggtttaaatttaggacactttaaaggaatataatttttttatcaacaaatgtgatatctttttaaataacaaaatttaatttaaacaaaatggcatccacttgattgaagaattagtgagcgtttcataaatagaattcacaatatatattaagggtataatagaaatttaacaataaacatatttaaaattatatctataatacttatcatatctaaaaaaaaatcatctatttatttcttatataaagatcatagaaatagtatttgaattttagtagcaattattttgaaaaattttactgatgaatatctaaatttttttcattcaatgacttaattattttttattaggacaatgactgtaattatttaaacaaataagtgctaattttttaaatgtaatgtcataaatttttatatttcagccaatatccttaatttatatttttaattaattaattatttgaaacattgaattcatttgaaataaataaataaacgtatcttcattaatatgttaaagagcaagacttttaaggggtctaaataaacaagacttaaatatagttttgaaaagtgttaactatgttgttttctaattaaatttttatgtcaatcatttaatgtaataaagattcacattaaaaaattatacaaattatcaaaataaaattgtaatttttattgaagaacggcaaaaataaaatacaaacaataattaaaacttatagtatataaaatttgtcctatattataaaaaaatgacacatatacaataatttatatatatatatatatatatatatatatatattttgtctatttctctttatctattatttattacattttaaatttatctcactttctctttgttatacattttattgtacaatttatcatacaagtattattcctctattaaaatactgaagcaaaaaaaaaaagtcccattaaaataccattaattaacacgagtaagaaaacttgaaaacaattaaacaaaatcataattgcatgacgtggcagggatgctttaaacatccgatagtttgcggacaactacatctgaatctgatgatgtggcgctaggtttgctagtcgtggttgctggctagcggatgtgcaccacatgattcctgtaacatttttattttactagtaaagtatttttttttctctatcgatatttattcccatttataaagtattttttcaagattataaataattaataatcccatgatccttttaaataattatgtaatttttcttctaatctctcacaataatcaaatatttttacataagtcgcttcatattatatatatatatatatatatatttatttattaaaatatctatcttgaaaaaagtgtttgtaatggtgatgatttagaattatttgttagtgttttttagttgtttgttttttatcaaagtgtttttatatttttttttctaaacctcttatctcttttaatttatttcattttcaatatctttaattttaaagttgattgaaaatatttttaagaaaatttatcaataattaaaaataacattatatcacaatataaattatttatcataaatttaaaatataatttatatgttcaaaaatatttatttattgaaaaaattaattatactataatttatatatttaaaattatttctttattataaaatttggttatataaaacacatatgattgtgtacagtgcacgtgctaaaatagtaatgcggcagtgtatatgaaagagatattaacttacatcattataagtataagagtgttagagcatttctagcaaaaatacttacataagttatttaatttttattttatttttactagaacaaatgacatgaaattgcttaataacattcatataataaataatatatttttcaactatggtagaactcacaaaattaaaattaagttaagtattcaatttaacaattttgcattggagtgaatttggtgtaaagtatttaaatttatatgaaattataaggcccacaaaaataattatgcattgtagatgtttttacactcattctcaaacttttttattatcatctaatgacctgataaactttgatacaaatcttcatcaatttatttttacttaattataagattagtgtcaaagtcaactatttatttaatttattagtattatcaaatcattggtatgttgtcataattattattattgttattgtcttcattgttattattattattatgttgaaggtgatgatggaaggtaccttataccaatataatattattgtcaaatattagagtatgtatttttgcgattgcatataatatttttgcctctagctcacagtcgtctcttttaattgttgaagtaccttataccaatatatacctcatgctattcaagaaacacgttgcataatttattgtttttatataagggatgagttatattgtaaaagttagaaagacaagagtatgatatcgcttgtaatctcgacaaatcatatataatagatatactccataatagtgtaattttcactaaatttaatatccaaatagtgttggtgagtttcctccatcgctgctggcatcaatccataatgggtagatattatcctttattatactgttgtgccgaatgagctaaaatatagcaagatgacacaatctaccttttccacaattcaaccatctcctgtgttggtgcagattctcactacagttaaaaaaaaaaaaatcatttaaagatattttccgccgaaacactgccatacgtactattactttttaatattagccacctttttccatgcatgcaagttacccgtcattcttttaattattaattatttttaaaattttatttcctgttaaaaatttcttttttttttctttctattcttaattttaattatttaatttttaatattaaaactttctattttatcttaaatcttaattattatttatactcttacatcgaatcttaaagttttttttaaatgtactctttaaatctttttcatagatttaaaatatatattttttacttatttacttaaatgaatcatacatatatttcttgtaactttgagtattgttaacttatattaataaatggaatatgcttttggtggaccttacttaaacttgaactattttatcaacgatatttattcattgattgaattggtaatactattataagattattttatactaactgttagtgtattaaactctcaaactttaacaaatgtgcatgcatgcaaaaatcaaacgcaaatcccctctaaaaaaatttgcatgcattaccagctttaactacacacattgaattaagagttgattagtttaggaaagcttattggttataaaggtgaaaaaagaaaaaaagaagaagaaggaagggataagttaataaagtgttaagtgggagatttggtaatttggcatcgggttttatgagaggagctgcaaaccgggggactcgcttttcttttcattctgctgcctttcatttcaccattgccaagacgttgataagtcaaatagatgtacgtttccactgctttgtgttgcatgcattggggtcagcatggccacaatttgttccattcaggggaggttttatatactactatcgtattttcttggatcaaaaatcacttttaatcatatattttaattacggaaggaaagacaagaacatggtggggggttagggacttccaagcttggcggattggatgtacttttattcttaatttaatgattattgataatttattaaatatttttaatttttttttgtagtgatcgattattattaaactttttgctcaatccactaatagaaactaatttcactggtggttattattaatatgatgaaattttacatatttatttaaaagtactgattcatttctagtttgtttttaagtttaataaaattaattttcctccttcgaaaaaataaaattaattctttcgtaactttaatataaattattaaaatgtgtgtttaaattatttttataagatctatatgacacattttctatataatttttaccgtttattccattttttttaattagaattagaagttcacattgataattcacataacctttaaagtccgacataactgaaagtaagatgtaaagaaatttttaagagaatattttattttgaatgcgagaattatatgttgagtattttagataacaaatgtgactttttttttgttttataaaaagtaataacaaattctttttttagtggatttaaactttaaactttaattattttatcttgaatcaatcctatttgaagtaaatatttattatacagagtattgaaaaaaaaacttcaatattcacaacaacaaaaaatttaattctgattagaaataaatagcacctataaaattatatctaaattatatactcactttatttttgtatcctttctatttttttatctttattttcaaccacatcaattgtattatctaactcttatttatttatttaggtcatacaaatgagtttggagtggacgttatcattttcgatatataaatggacatacacaatgaatgaatgaaagaatggttctcaagaattttagagggcatttggtttgaaataacattttttatttttattttttattttcattttctttttctgaaaacagtttccaagggacttcgtgtgttacaaaaggaaagacacataggaaggtaagaggttttcatgttaattacgaacataccaccgtattttcattattttctgtttccaaacttaactaaagaaaacgttgaaaacgacttcttagcgatttcaaaaatggacttcatttgttatggcttttgttatggcttacgagtgcttacgttttgattgcttggagctaccatgagccctttgttaaaccatattcactttatgttgttgatatggtgtaaccttgggctacacgtatttccattgattttgtaaatggttgaggcacccatttgtgtcctttatatatatatctttgttgattaaaaaaatggacttcgtttagaaaatgttttctcacgaaacatctcgaaaaaaatgttaaacaaacatattttcagttttgttttctgtttttttttaagaaaaaatagaaaacactcgtaccaaacagccacttaggtttagaatatatggacccgagcgataagaaggnnnnnnnnnnnnnnnnnnnnnnnnnnnnnnnnnnnnnnnnnnnnnnnnnnnnnnnnnnnnnnnnnnnnnnnnnnnnnnnnnnnnnnnnnnnnnnnnnnnntcttgcctggtgagtaagttttcttaaggaaatatatccttgctgctcaaaagttagttgagtaactatgattaattgtaaaattgcttgtaatttaggcataaatcttgtaagtgggtcttcttccttctaatactactaatatcttgcttggtgagtaagttttcttaaggatatatatccttgctgctcaaaagttagttgagtaactaggattaattgtaaaattgcttgtaatttaggcataaatcttgtaagtgggttaccgttagcaacttcaatgtgtcattaatatcctctccaatattattatgagtgtcttttcatttctatagtcttttttcatgaattttttttctctcttaattatatatccttttgtctttatgatatatttaacgtgaaacctattctctaataatttaaaatattttatatattctagggttatatatccaaataaaattttatgtatttataatagacatatttatcataattgtaagatatatataactattaggtcgtgtaacacctaactcagtcagtccaaagacttgacccaatttaatagttttagattgaatttaattaatcttgtctcgtgaaagaataatagaagagaaaaggattattcttttaacttttttgtcaccacatatcgacttgtattattcatcatttgagaaatcataagattgagtttgctcaaagatccgctccaaaacaagattctttatcaaataaaatcatataatcataccatagttaaaatattttacagttaagttaaacagctagctcctccataaggctcataaaaaaagtcatcgtacctaatttcaagtttaactttactaatacgaaatttcttttcaacaaaatatatttccatgtacaatatcacaaaaatcaatattagctttaaatgcgatggaaaaagaggtagaaaaaaaaagagaaaaaatgtatgaatttgtgagaatatctttttcttgtgactaaaacatatgtttctaagatgaattttgaataactacattggtcctcagaagttgagagactcgtgcatcctgttgttgctagttgattggattcttgaccaacatgaaattataaagttcacttgatgatggaaggaagaaaaaaaagaaagagataatgtatttaaattcatctcactaataaaaattaataattaatattagtcgataaaaaaaaccaactcaacaaatttatcatgtattgctggtgtctttatactgttttttaattttattttatttaagattttaattttttttcatttataatctccataaatttatattttcaagatcaaaatttaaaaatagaaatttataaaaactaaaattacaaaaataaatttacaagatcaaaaataaaaaatattaacttataagaatcaaaacatatttaaatctttcacaaatgaatgaataatttatcacagatatgtaagaagaaataggtttatagtattttttttagcttggatggtctttattcaaaatttctagtttggtcctcagtttgcttgaagaagaccgataccatttaagcatttgtgattgaactactagttccttatcagtgttttagttttggttatggagttgagttgaaaattatagatcaaattgaactaccaaatttcctgaactacataactacctgacagcaacatattaaggagtccagtatgcttaaaattgatttctaaaacagcatagcacatctagggaagttttacagttttcgttctcacccttggtagcatatatacaaataaaggtttcgtgttaaatagacaagtattctatcctggtaattaagtttgctgagaagagttgacgtcatatcttaacctgaggtaccgcaacatggggaatatgttcacacgttaagcagataggcaaatgaatctgatcaagtaattaattagttaactagagcaccagaacaagatagtttaatttgtaggattaagcactcacttttctctgatctctagaataaataaaaatataagtttttattaagtgctactttttaaacttaaaagacttctcttttatctgaactgaattgggacatcttttccttctaaaattatttaccatgaacctcaaagaaaataacaaagaaagatagacagaaacagacaattcgaaagagtagtatgtgtgtggggctttgagaaggttatttatgggctaatgaattgtaggctacggtaagctaaaggatcgctcaagctgttctttaacatgtcaaaagtggggatttttttcccttctccgtaatcttccgttctattattatgattattcgtataagaattttttatctaatgtatttgtcattttaacttttcaaatgtaacattaattatttttttccacttatatcttttataaattaatgataaactacaatatctaaaaattaattgataattataaaattatacggagatattacatcctatttactctggtacatgcatgtacctctcatttttcttataaccattataattagagtcaatttaagtctgatagaattccaaaagtattctcataattgtcattaattataaaactaatttttatgtgggactaacttaaatgcactttacatttacctattaatgtaggtatttttttttactcaagatggttttgttattgtattatgactccttatggatttatttattagacatcaaattttaacgttaacttgagcaacaaagaaacaatctaacatttaacttcagtttacaagttcctaattgaaagaaaagcattagactggtagattttgtctatctttggaaagttttgtagcggaatgttttgaagctagagtattttaggaattagcggtgttcgttcaactgtaaggtttgccttctctggtttcctgcgttagtcttctccatctccggcgttgaaaagccaacattctttggtcatcacatataattcaagtgcattgcaccattattatttataaatgcgtctctatcacacaatgacacatatcaaattagtcttttaaagttttcaatatctcgcacctaaacatggttgttgtcaaaatgttaacaatacatgatcgtttaggttttcacatatctaacaatatacgaaaatcccacaatttgccttcacattaaattttcattttcatttttcacattggcgtgtaaactttcaaaccttatcaaacaaacgtcatggactcatgcgaaaaagattagtttaggtagcaacattaccccatggcccagagtaaattcttattcttaaagggtgaaatttttgaaatttgttatctttatacttttaccaattcgtgcgttaaattatccttaataatccttatcatcaatttatttttaatccaatatcaaaatgcaccttcctcagtgaggtgcaagttagacgacgacttgccgtatatatataaggcgaaggcggaattcagtaatcagtatcatgtttaaagcattagaatttaataaacttaggtttgacatttaacaatcaatgaggaaactcaaccattctaaatataccagccaacaaaattgaagtgtctccaattcaaatcagttaatagtatcattattacagcattatgggttattcatgcctactttttttttcctttccttcgtaattaatgtatataatgccaatgtatcccgttgacataaaagggggacaaggtatattggctgagggaaaataaaattcattgaagtcaatatttaataccaataaggaagatagtatttttcgtgaagatatttcttcgaattactgtgtgaagtatttttttgatttaatgattaatttttgttaaaaaaattattgattatttttggtgaatttttatttgtaattatgtttttcctataaataaagctcgagttgaaaatcttgtttaagagatccaaacttgatactaattagatcaatgaggcattaattctcgaagacatttgactccttaagtgagtaaaggtaaaataaatagttttatttgttaatgaaaaatattatatttaaggtttatcaatatgtgttggtgtaactgaaattcatttaaattttttaaataagattttagattccaatttcatgaataacaaaacgtagttaataaaagagacttattgcatcaatattatgggtgacccaaataaaatatatttaagatttattatatatgcatgtatacacatacattgaacacttgatttttttaattaataattcaaattattaatttttttctctaaactgatttattttaccttagaagagtcaaattttagtcaaatttttttcacatatctttcttaaaaaaaaaaacaaacaaatcgcatgtatttttttcataaaaactatttttatttgaatttaaaagttaaaacatttacaacgtgatcaaactaactctctcaataaaggcttttttttcatacacgactgaaatcaaaacctttatttaaagatacgtgtcacttaaattaataattagttttatttcaagtacctttccttacacctttctattttgatgaaaaacagggggaaaaaagtgtcctatattttttacatacaagtacttgttaaaaaggcagtatgaataattctacaaaaataatataataaattaaaatagtactattgtattgataatcatgcatgtaagaagattatgaactatgaagttatatgacatttggcatctctcaaggttgtgtttcattatactttcttcttagtagaaaaaaaagtctaaagttaatacacaaacaaaaagaaacgaataattctaaaattttcaccatccttgtatctcctatttcttccgtgtgtccgtgaatgtccttaagtatttaaagaagaaacattatcatttttttttacttaacatatatctcagcaagtgttttgttccatttgcacgcgcaaaatatcaagcaaattaatatatcattagaaaaattaatattgaatattttcatgtttttaaataaaacatattttaaatttaatgctactaaaaatatttaaaatttattctttttataaatggatagcattattgatatcaactatcaagagtcaaactttggtaaatttatacctttaataataattttatgtatgttaattttttaatctcttatctcacactgttgtatcaaaagttcccaaaaaatcatttgattttacataatttaaaaactgcctaatacttcattataaaacattatttgatgtgtgatatgttctgtcaaaaaaatatattatttaatgtgtaagcaaaattacacttttacatatttatgaatgtgttaggtatccaaacttcgctctaaatatatatgtatatatataatttaatggctaaattgataaaaaataaaataaaattgtaaaatgttattagttgtgtatatatgttaaattatttgatacttgatgtgaattgaacttatctatttatcgaacattagaaaaacatcttaagataatataaaaaaaaaaaaatcttattgatttcttcaaccatgcaccaatttgtggttagtttttggctgcgaaagaaaaagtaaactctcaagtctcaacttggttgttacatagtggatatgcttattgccggtggaagataggcacctttttcattcaatgcctgcaactgcaatatgctgtgattaaaaaactactttggttgcgtgctagttgctactgcctacaatacacattcaccaatttgcaaatgcaatttgaagttccactgtaatacataacttgcatataataacacatcaacaattattcggctacagtaaaattgagctctcacaagtcaccaacaaatcactcggttataatctatatagttttatactttattttaactcccataccaaactaattaattaattttttagatgggtcctccctatggttaatatcttcttagaatgaagcaatttgagggggaaaatccttcttaccattatcaatgatcatacgtcaaggttggcccctcggattcaattaattaccgtaatcaaagaatttattccctgttaatcaacagaagctacaattacgactttttaatatttacgaattaatttctcaccatcaaaattatttacagttaaatatgttgttggtcctgtaaaagtttttaattgatttttatttttctaaaattaaaattaataattttagattttactgttattaagcattgcattggttaactactatttaacggaaaggaacgtaatcatcctaactaggtgacacttttttctagagatagattatttcatttgaaataataaaagagataaaagctggaatatgatcaaaccgatgaatgccagcatgtaacctagaagccttagcaagagaatgaactacttggctggtttgtctccttaaccattgtagtgtcatgttaactcatttctctaaaagaaactgagacctaaaacaattgtttttatctattctaaaataaattctaagtataattatttcaaattatgtaaggattgaaattaaagaaaaacttttacaagatcaacattcaagttcactcattatatatgaactaaaacaattatttcaaattttagagatcaaaattaaaatttactcattttacaaagtttcaaaacatctttaatcaaataatttacaataatggttgaaatataaatagttttaggcatttatatagtgttacttggaatgagcactagacctttcatcagacacaagcatttaaatgatgtcatatgatgatagaccaaaattattgattttaaatttttgaaggatgaaaatcaaagaaaaacttttacgtgcaccaaattttttttaacccttttaattttttgtaatagtaaaatggcatttatttttttgtccaacatctttaatggtttgaatagcaggattctgtttatttttttgctgctacgtaataaatagggcccaagtcccaacgtaccacatcagcagaacaaatactactattaacacatcctttattactaagtacactccataccccctttctacctcccaattacccattataccctttttcttaaagaagtacacccattttactttccaaaaatacatatacctatttcagaaatgtatctctaaaactaagatttatagttctagagatatacttctggaatatgtatatattttttaatcaaattaagatggttgacaagaaataataataataaaaagataaaaaaatatttattttatatccatatttattagtcttatttttatcctatcactagtgttctttaaatcttagtgataaatataccttgaaacacattgtcacatgaaggaaaacacaaaatattgtataataatgatgaaaacatagtattatataattaatatatggtgaagatggtttaaaattaggatttaaagaataataaagataagatgaaaataagattttagataggatttaaaaaatactaatgatagaataaaaataagactaactaacatgagtataagataaacgtttatcatctttttttatttctcatcagtaatcttaattcttaagtgatattttattaaaatatatatatttattccaaaagtatatctttggaactatgaattatagttccatagatacattctcgaaataggtatatgtaattctagacatacatttctggaaagtaaaaggaatgtatttctttaagaaaaaggatataatgtgtaattgagaggtagaaagggggataggggtgtaaatagcaagattcttgcagaaataagataaacccaaccacatactacacatttttttgggttgtgattgcttttttgggtcgtaagcaattgagctttgacctaggcctgctgtctgaataaatggcccataggtcagattggcagagccttgcttgcgtatgtgtgatctccagaattcgggcaaccaaaaattatatattgacaattttttatttatttttggaactggtaattcatacccaattaacgaagaattacactatgtattttagcgaaaccagctttctttatttattaactaccacaattaggacttttagatgttgaatgagaccctaagtatctttaccagctttggtttttttaggctagttatgaaactaatcttctgattaggacttggtcacactaaaacttcttgtcacttttaaaggatatgttctatgagaattagcctaagtccttttatcacaaacgcatcggtcttgtgagcaaaaacaacttctaatgcgtgaatagttaaatatataaaataaaaaaatgaagtttgaccgaaatcatagttggcattgatattcagttattatcgactctctttcatactttttagcaattttttttttgtacactatttccatgccctgttcttatgataaagattttgtgaaacaaagaatgtgaaggaaaagataattaattgtttaggtaactataccaatcctgaagctagtgatgatgtgaagttaaaacaggtaggggaggacgattaaacttgaaaaaaatctacgttaagaaagtagcatatatttgaaaacaccatcaaatagcccctcagcttaattatttgcatgtaaagtctcctctggaaaatttgacaagcacttcataatagatgaaaatttaggccaactcttctccttgttttggatctcacaggctgaacgagatgatttgtcttccaaaagtaaaaccatatgcaagttcgattatttggccaccaaggaagaacctatcccaacattacttgtatgcttagttaaatgtagaagctaagaatgtgcctttattgggatttacataatagaaattaaaattgagaggtggcacaaataaaagtaaaaagtaaagggaagcactcatgatcatgagcaccacttaaaagggttccaaaagtgcgcgcaaattaaggaattcttcagtatcccccaaaagtgaaagaaacggcccaaaagactcaaattatgagttagtgcattcatggtcaattttctctatttcacgcagatttaggcctcatgtcttctctcttctcatcttttacaactttgtgacaagtcatagtcataacatagtccaactttgttgcacacaagagtggatttggaaaatcatgtcacaaatatgaaaaaaaacatatttaattgattcaaatgtagattttttttaatattttaattatggattgttgttgcatcattaaaggaatttgactatgataaagcttagttttatgtaatgcataattgaatggtagtgcagacaaattttagaccagcaataatttatggttaaacccaataaaaataagtttactctgttatatcacgagaattagtgattcttttttttaattaatttgtttccattagctagaaccagtggtctgtgagcactgggaaaccagaactaatgatgggaatgttaagcagggtcatgacaacaaggtgaagaaaaaagctatattataataatatatactataggatatataagatattcgtttaagataaggatatggatgtgttgagatgcaatatttttttaaccttgctcaacgcggaatagcattgatgattaggttaaaacatgcacaagtaaatgcttaagggggtaataatcgttttcatatattaagaatccgtgggtccaattattgagcccatgcaaccaccttattctagtatggtaaagacgagaaattttattttacaagtaaaaagtgcaaattgaaaaaggaagagtgatcaacttatacaagtgtgaattacacttattcttatactattaaaaattatgtataaaatgtaatttttttttttttactgaaatttacatctatagcttttttcttttttaaaaaataaaaataaacttatcttttattccgctgtgctatcttggattccaaaaaataaaaatcgcatatcaatttaccaacataaattcgttgctgacagaatagcattgatgatttgacgcaccatcttatgatttgtttgtttccattctttgctacttttcttcaaaaaaaagataaagttctcacacgtggcaatagccacagcaagccaaactacataaccagaaaagcatttttcattgtaaaagttatggtacatgtaagcaaagcaaattacaaaatccatcacttgcattaaattaaatgaaattataaacttttcttccaagtcaattaattgataaaattgtaaagcatataatataacgagtatataatagtgcgtataaattaaagtccccacatacactttgttcttccatgagggtaaacctgcttgtaaactttctctggacacatgaaacagtgaatactccattaaaaattaaaagacaaaaagagacaacacatacggattccatcatttataagccatttatgagattaatctctttttgaaaaatatgaaggtactcaaaggtgagttattacttatcacttgtcagctaatttttttcaatacataaaaatcaacatttaaatccttaatcccttgcttaaaggacacaaactcatcaccactcgtagtaaatcactcctatcatgtatttcattctgcaaggattgggaaaataatgttctcttgcaatttaccaaacgggaggtgggggtttgtttactctcttccacacgtcatgatccttcttacgcaccataactttgcaatttggaagtgtttacttggcatggcaccgtcatgatcctacttgcaaaacataactttgtattttggaagtacttgtttggcaccatggaagcaaaaccccaccagctagtgcgctacatatgaagaccactatgtaaatctagacaaggttttcattcatccggaacatgtttaacaaattatttcaattagaacattattgagaataattagattgacctgatggttgaaggaaaaaaagaaaaagttataaattcaaatttttgtactaacaaaaattaataaattagcacgataaaaataataattgagaatgattaattttctaagaaatattgtttattttatttttttacttatttttctaaattgtgaaattaaacatgttaagttataatttattttactaccttatataaatttggttgactaaaataaaagtagttgataaattaattttttcaactaatatagcatttttcactttgaaatagtatttaaacttgtagtttataatttactcttaataaaaaaatttatttaatgtctccttaaattacataatttgttttaataatttttaataaaatatttaatacttaaaagaataataaaacttcaaaatttatcacatctaaaactataattatctaaaagcattttcatatctcttcctctcctagtgtgtttggttaaaaaaaatattaaaattaaattagaatgtaaaaaaattgaaatctatcctatttcttctgtatttctctccatcaatacactcttaacttttaaccaagttaaattaattttaaactaattcattagatatattttttgttcagaaataatcatgggaatagaaaagagtaaagattccatacaatgtcagattaccgaacaaaatctcacatgcattggctttggatggaattaggataacaaacccccccaccatgctgaaattcgtaaaaccagatcaaagattaaagctaagtaatgccaagttaagtaaaactgaagtacttgcattgcatggcattatcctttgtcaggatctgtaaccagtaacaagtactaggccaggccccaacccttctgctactttaacctcactaagagccctaacagctcatgcacccaaacaaagtttactattaatttttatcgcattctgtagattagacccaccaactgcgtctattattaattggtctttgggaacaaaataagcacctatttttttataaaaaaaaattattctctgaatactctatgtatcgatgtaattatttttcataaatgaattatgggattttcgaaaattacaagaggaagaagaggacaaaagagaagaaacagccacactgcccaatcaactcatgtgggttcactttgctatcactatcgcttcctttctttcccagaaaggttctaaccgtctagtaccccttgtcccgattatcattccctggctcatgatcattttctaaaaatcaattttctatttaatattttcttttttaatctatgcacaataatacatttcaaaaataaaataaaaattacaactaaaatctggcattctcaaatccatgcaagtcactaactctgttcatagactttctcatgatagccactttagccaacctctcagcggctcgccaagccgaagtcggcgtaagcggctcagccttctcttcaacgcgactgtttctcagtgtttgcctttgcctgcgccgttgaagctcggcttgttcggcttcgagccagcggagaaactcctcatccggctcacttgactgcaagagaagcgcgcgagccgaggagagcaactgatgagctccagtgagatcattgtgttccgcgagccggctagactcagcgacggctcgtgcggtgacgtggaagttccgcaagcgttcgatcctggcgcacgatgatcgtacggcgtggggacggggaacgagcattgcctgctcaacgggatttaaaggctctcgagtgagagggtcccgataggaagatcgtacggtcagaacgtggtgggacccagcggaagctgcaggtaccttgagctccacgagcaattctatctcttcttcgacgtagaggtcgccgagacggatccaacccgacgacccgagtggaacgggtcgacccgaaaatgagtacacgcccgcgatctccacggcgcgtgatcgagacaccacctctaactgaatcctaacgtcctgagccaccacgttcaacaaacctcccacgaatttcgcgagcgcgtcgtcggaaagcgcgtggggagactctcccagccgcaccgcgtggacaggcacttcaaggtgagtaaggcgtgtggtggaaacgagcgagggtttgtggatactgatcccggcgtgcgagtccttgatatcggagaggactacaatgctcgcgacgacgttcttctcgcggcggtcctcgagaactttcgcggcttttttcacagcatcattcttcaccggagttccttctcgtgttcggtcaatcgcagcgagggcgtcgacgatccgacgcgctgaccgctggcctccgccggtcatacgccgcagcggaagcagccgcttggatccggcggagaatgcgacgatagaaagacgatcggttggacggagcgatgagatcacttgccgcatggagtttttcatgaggcggagcttgttgccggacatggctccgccgacgtcgagcacggcaacgagatcaattggagctcgacgcgccggtttggtcaggtgcggcggcttcagcttcaaaacgacgacgtaactctcgtagtttcggttggcggcgacaatggccacctccggcatcaacgatagctcgaggttcctcctaattgccggagaggacggtaaattggaaagtggattgacattaaagcccttaaactccgttttaatgttatcatcttcgtcttcgtcttcgttttcggactcgggaataggattgaagcgagagagtgaagttggagacatgagaggctcgtcgtcgttgtagaccttgaatcctctcttgtcgcacttgtcgttgttgtggttgatggagagcacaggaagctccttccagcttgtgttgcacacggggcacgtgacgatcgggtgcttcttcactatgcaagggaagtgaaacgtgtgagagcattccgctgtgaatattgcagttccttgcccactcctcacgctctgcatacagattccacatcgactctgcacacaccaaaaagaaaaaagaaaacagccattaaaattcaaccattataaagtgattaataggcataagcacaagcataacataagttggtgggtttaggaaactagttaagtagagaatcaaagtttgtaactactaatttctttggttgcttactttggatatgcgtagggtggatttgagaagtgagaagctggaaggtgacttgggggatgagggattggagttatggaacaaccttggagtttttgttttgcattgaagttttgggctgtttgggactgagcatgtggtttgacatcgaaggctaggggttgatgaaggctgagactcgcaccggggtcttgatgggttggagaaaaatccaaacttggaactgtgattattgttgttgttgttggtggtggtggtggtgttctcgcaatgctgttgttgtggttgttgttgttgtttctctgttaacactttgggttctctgtctttggggatggatgtgcagaacgctcttctccacccagtaaccattctctcactcttctggatatcactttaggagtttggttgatggtatgtgggttttagaggacaaacgaaacgcttctgagcatgaaagtcgattacaaaggggaaaggagaagaagaaatagattagattcagagacccttttcatgttcctcttttaattccttctattatttccattccccaccatgtagtatttatttatgtcttgacctatatgtgtgaatttctaattttctgtttggggagcccaaaaagagcacctcaatggaaaaaaagccttggctgttgcttccaaattgaacacagtccaaaaggggtgtatataataatatcataagcacgttaaatcctagaaagacacaagggttttgactatagttgggaatattattatccgggtaaaaaaggtgggaaaaaaaatggtggtgggggggggggggggtcttgggattaacatgggctaagtaactggcaagtggaggttgctaactacagtaacaagtcaacgctctccctccttggaattgtgcaaacactgtctgattcccacgttatggtcaccgacccatgcaacagtgtgagatcgagaaccgtctccatctctgcctttgcacgcacagagcttcattcatggtttactctgattcatccctttcgccttaatcttcgtcagttttcccttttcccttttcccacaaagcaaaaatcccccttgaataagatattcattctctaactttctccttttatttatttatttattcaaaattcaaattttataaatttatttatttggttggttgaaatgtgcatgaaatgaattactactactactcacgagtttcaatgagctgtatgtaagtaagtaccgtgattcggcattaagtagctgagccaactttttttgatacctataatctggttcgtccgtagtgggctccatttcgttggcgtttgatattaatggtgtgggaatttgtgatgttcatgacacatagaccagtccttcaccagggaagggtaaattcgtcattccatccctgtacctcattaattaccataacaataaattattaatttgagctctagtcattgaattgaataacggccattggttgggtgtctgatttttcttctttttttttttttgtctttttttaatcctcatcgatcccaagaaaatgctcaagctaaacactgtagtaattgacccaccaccaacgttattagcaccttttttttatattaaggaaaactttttgttttggttcatacattagagacttgaactcttcttttacatcaactttaatgggtttttgtaactttggttactcatgaggataattatcaactagtctcgttagaaccccttatggcacaaagctgttttagacacgttattgtcgacatttgccaattggggcatggcttaatgacacctaactatatactcctaaacctctcacctcttcgtttattgaacttgtagataaagatcaaactgtcctccgaagaagtaaatattttagctgccaaaacaaagggtaattgattgtaagtgaaatcaaggttgtcaagcctttatttgaaaccctccattgatgatgtagtatttggcagtgactaaacagaacttgtgatttgacctgatatgaaacggaacaaaatcgttcccattcaaccttcaaacctaggtgcccatattggtgtataatgatatcatgttttttaatcacttatttatcttaagaataatagttaaagaaataaaagtgaaaatatatatttaatatcattaattcttttgccgacaaaaaaaattaatattattaatatagtaattttatagtaaatttaataaacaagttatttataaaagtcttgatacttattcttataatagtaaatagtaaataacataattcacaattactacgagaaagttcgtaactattgcagtcaaaagtcattgatattaccaaaattgtccgtaatttattgtttcttctgtctcgtaacaattactatcatcctgatttttttataagactaaagaaaattaaaaaaaaataaaaaaagaataataattttataaaataagtcttatcaataataatttatatataactttttttgtttatcattaatattttaagaaatataaatagaataaataaatttcacttttaatttgagcattataaacagcacaaagagagcaattattatacataaagaattagaataattattatgctgagacttatttttttatacgaaagttattataagaaacagagtaatttttatataattgcagggtaacttttggaatcaagtacgtacgtcaatactcttaccataatatacttttaccatatttttaaatgaatttttttacagtacttattaacttttctaatcaatactcttagtctcttaccataaaggataaccaaactcatgattactataagaaagttcataattacaaacaggtaaaaactgtcaataatagcaaaaaaatcatcagtagtgttcaatttttagtgatatattattaacgttcgcgtagctgttaaaactaagcacgttttttttttctcagtggccaaaatgaagctaactttatcaatggcttaattatccgtaattactaattaccgatatccacgactggatagtcaataaatgcatgataaaaattccatgagttttgtggatgactttaccattattggcaatttcatcgtcagggatggatttttgtgattttctaaataactatcaattttaattttattttatttatttaaataatatagaaaaaattataaaaataaaaatatagataaaaattatcatatatgtaaataataataattattattataatatttaataactacaatatacaaataaaataaaataaaaactaaatacttaaatcttcaacataatcttaatcaaagtgatcaccattaattgtgacctttatgaggcgatgatgataataatggttgttgaattttatatgtgaactttatctgcgtactaaacacaattattttaatttaattagtaattaaatttgagttctaacttttaaatatagaattatattaaatatttaaagaaaaactttatctctcttaatggtctatccaagttaagcaaattttttgaattttaacttagaattatattaaatactttaaagaaatttttttatctctcttaatgatttatcgaagttaagcaaaattgtttctcataaaagatgtgtatagacaaaaaaaaaaaaattgaaaaaaactaaaattcttgatagaagtgagagactctaagatactagtaactagcactgaagttaacaatatcatatatatgtcctttcatctttccattgatcacatttgctctcaccttcaaggatctaaagagatctctataacgtatatatgttagtttgagaccgaaacgatctcaccttaaaatgttcctatatattcttaactaaaattaaattaaattaattatatgtgatttgaggtaaacctaatattgtttggcgagagggttcatctataaactcttctgaaccttttcctctcatgtgagcagtttagcatgtttcattgatgaaagcattttttttcaattggttcgtaaaagataaacttattatgtgtttgttttcacgtttacacaagttttacgcacatatattggaagtaggaggttcatgttttagtgtaaaagatcgattttgacatggtttttttaatgatatgtgtgtatatatatttgatgggtttccaagcacccacttttatatatatataaactaaggtttaaaagaacttgatatataaataaaagaagtgcatacttgacaacattcatgcatggaaccctcccccctccaatatgaaaaaacttatcctcttttctatgtctaattcctttgtacatgatatgtcaacggggcaaaggcacacagaatgagtatcgagtattagatattcgtcaacatattttcatatttgtttcagatatttcacatgttgaaatttgttatctcatttttgtatccgatgggtatcgagtattctcgttccggttcaaatttgtaaaataattttttttataaaaaaaatattaaaaatataattttagaagaaaaaaaattgattgctacacatttatttttaactacttataaatcaataaattcattaacacatttgtctacaaaactaacaaaatgacatcctcatcccgattccatttaacaaaatcgggtaattctcaaatccaaatctatacccgatcaacttgagtatttttcgttaaagtcgagatggattcggatgagtaccacgcatatgagttatatcttgtgcatgttgttacaccttattaaaaataagtgtcccacaataacaacaaatacttttttacgtgagtctagctagctatccaattagggcgttttccctttttttttttttttatcagccaaatatgaaaatgtattagaaagagggtaccagaaataccttaaaaacattacaactgaaaccaaaagcttcacagtaggcatccaatttgtagtgcgttgtcccttacaaattgtggtaagcatattggataggtgtggtcactatcgtgaacccttgtggttgaagattcttgattcttcggatgattggctcattctcctcaaaccatgttacataacactaattaaaaagtcactgcatgcactatataacaataaagctaagaaaaaaaagtaaatgatgaatttaaatatatcttgtttaccatttttttttcaaccaccataattaatgcataggctttggtttagatgcacttaaagtttcttgtttctactcaagggtgtattttacgagaaattaaattcaagacctctctcataaacttaacgtatattgcaaactgatccatttggttatcaagtttaccttaaaggtgttaaatcatttttaagtacatccatagaggttttactctaagatgaatattattcctgaaattgggagcaaatatttgcaatcgtggactagtatgccttggttgtgagaaaaaaaccaaaccaattaaaaaaataagttaataaaaccaaataatttaattaattaattaattaaaataattttaaaaaaataagctaataattcttaccctcagctagtaattaagaacaatgatatgatcatcttcagtcatttgcatttttggggagtccagtcaacactaagacacttgactgacttcagcatatccctaaggtaattcatatataaggtgtgggtgttccaactttgaaatgttttgagagtccttgacatacatgatattaatatccataaagaccctttgcatcaagcataaagaacactattaaatacaggtaaaaataactttcagaggcttttttagagaaccttgactcctcaactcaataagaatttgagtatgagatctgttcttgattaaattctatgaagtataaaacgaccgaaagaaaagtaaaaaagtgttttaaaaacacacgattattgaaaaatgagcatctggtgagattatattatttttattagtgggaatttaaatttactatataaacataacagtaacttttttatttaaccaataaatttaagtacagcaaaactatatatgttcacaatccgaaaaataatacataaaacccaaatatcttaaggtagatggagaagtacagtgctcaactaaataaaacatatatcaattttcatttatgaaataagttgattgcatgtgccattgtggttttgtattaatatttatacggaaaaaaagatcaaaaaaataaatcaaaacgctgtgataaaacttgattaaaagtagtttctactaaaataaaaaataactgagccgtgaaatgttgacatttcaccaatacggtaatggcgaagtctgaaaggttcagccgttcaggtgcttaacacattttaaggaaatgcagactttcttatgatcatgaaaaggccaggtctaagggtgcaggtttccctgtaaagttctcattatcatcatcataaagtttcttttatttaaaaaataaaatatataatttaactcatttctctttcctcaactctcatctttattctttctttttaattaagacatcatcggttaaaaataaaaaattaatctgtactaaaaaatatttaagaaaagaatatttttaacaaatatttttctattcacataaattaaaaatcatattcataatcacatatttaaaaaataaattcattatccagcctatcatgcagttctgcaacatgaagtctaatctaaatggtgtaggtgtagctaattagttataggcatacatgagttggctcaccacctctcctttccctgttttgtctctgcaagctattacattgttatttgtatccttccaatagttaaatgttaatacaacgatttgattgataattgatttctcatgtctagtgtcgatggtgggatttgattattcgtaactaacaaagttcaagtccttttttatttattatttataaatgggaaatctaaaatcaacgtattaacttattaagcacacgcataactatttcttgccatactatataaaaatgaaacaaaatatgaaagccttgctgctacttgtaagctgtcgaagctgtttccttcttcttcttttttttcttttgtggactgaatttgccctagtttatgaaaaaacttgatcttataatttaaatcctataaatggaggaacaaatggaatcatatgaagtggaattttcttaaaatagagaaaatgttaaatcaaccgacgacttattttgctgaaccaaacctatatagttgagttatccattcaactgcgtgttgatttgtaggtctgtctggatgaacagagagcatgcatatcggattggtggaaaaggatattttgaaagaagcttatttataaaatgattaggtggctctatatttacccttttcatttaatttaaaaacagtatcaatttaaagaatatttttatttagtttattataacttatgaattgattttcattcattactcacgggtatgaaatctcaatagcaggttatgctcaccttttgtaatgattaaaagttattttaaagttaaaactcaaaataaaaaaatttaaaataaaatgaaaatttgattggtaatttaacaccttttaaagcaaaaaagttatttggtgaaaacattttaattttctaaaataaataattaaaaaacctcacaataaataaataaaattttaaataaactaacataagtgagaactatttaataggaaagtggcggagtaactatcattgaataaaaagagttaattaaaatttatttatattttaattcaataaatatttctgtctctggaggtattttatttccaatttttttttctatccactttttaaactttattttcaattaaataaacatatactatcatactttttttttactttctcttttctttcatttcatcacccacgagattgaaattattggacgctgagaatgtgttttagattcacaagtatcgaagaagcagtgcagcagtggtatttgacgccgttagtgaagtatacgtaccattcataaatgcacacataaagcctaaaggacggtgtcagttagtcaactctctcgatgttttgcgaactcacctgtcaacataaagtccgtacattagtcacatcactcctgcagtcaattgtacttctcaataaattacacaaaatatatccatgtatatatttttcttaaatatattttttattcatataaattaacgttttttattttagatttatgtaaattttttttttaatattaatccctatttttttattttggtttgtataatttttttagctgttataagttttttttttgtttttttctcactcatattgttataaaatatcaatcaattttattaataattaatttttgttaaaaaaatttattcacagtacttaattcaaaatcttacttgagtctaggatcacttgaattaataatttattttttttcttttcatttttaatctttgtaactttgtatttttttgaattttaatttttttatgattttaatttttttatttataattctcataatttcacgcttataaaaattaaaattaaaaaaatacaaatttataaaaactaaaaatgagtaaaataatttactctcataccaaaattaaaaaaatacaaacttatagaaactattttttttaaaaaaaaacttacatatgtcaaaaatataaaaatgctaacttacacaaataaaaaaatatatttaagttttttttttactgatattgatattttttttacaattgtggaaagttaaaatttatcatctcatatctagtagtattatagatgttatttttttgttatcaaggtaaaaaattaaatacagtactttaaatgttttaggtattctatttcaataaaaaaaatagaatttacttataatgacttttaatgtattgatcaaatgaagagaagtgtcaccctattaaaataatgtcttgttatacaagatggttgagcttatcacaagttatggacagagtttttataatttcttcccaactttctttaaaattatatctagtaataattttttaatttgaataaaattttcaggctttacttatttttttgtgtgtttttttaaatagcccatagctacatttctttaattgttttaatctaatttattgtttcaaagtcaatgtttttacacttggcaaatatcaagaagcctctgccaattaaatatctaaacttattaagcttaaagtctcgagattgtgatgttttgatgtaataaatactacattgactattcgtgacataaaaaaaaaaaattttaaaacacatcataactagactatgtttattcttcaatgttaatttaacaaaagttattgattggtgttagtatgaaatatgattattcatagtgtcaattaacattagtcgattctcacttaagcaattactcaaataatttactatattttctattatgttgttggtccactccaaacagagaacctattaaatgtgcggtaaagaaagattgtaaatagctgaatataaagtacttaaaagtaaaagtaaatgattaaggacaataaaaacaatgaagaaatagtaaaaaatgaataaaagaagttaattttgattgattaagatcatggaccttgaacctatttatagagataagaatgattacaaatcatcctctcataatcattattcctagatcttaggagatcatgatttacatgttcctaactagcttcctacattctgactgttacctcttcaagttttctcgagttattacatgtatcaaataactgacttttatacaaatgatcttacaattttaccccttattatcattgttaacaaaaaatagtcatcccattatcagttattctgtcagttgtttgctacctacattcaacccctcgtcagctaactattttggtgccaacaattcctaaaaattggatggattaaaaaatgatgttgctataatcttatatcaattggagatgtactttcgtctttcatttttttacattataatacgcttgattgttttaatttacgtaaccttatttgttatacaggatctacctagctaaatcatacatgaaaattctaaagtgatgtgtgaagaatattctgaaatttgaaatatctattattgaaaaatattttgacgaagttgtcaagttttgtattgactacatgttaaaagtataaactattggacttctaaagtctcatcatgtaggaaaagttgcaagtaagggtgcacacatgtagtaatgaagatcatgcatgggttgtgagagagtatttaagaatatgtacacttctcgaatagtagtgataaaattcaactgtactcatatgctcataaatacatatcaagaaaaacatatacttagaaaaacaataaattatcattgaatgagcgaaattgaactttctttatcccaatttagaaattaagaaatttttaataaatccagtgtatgttcttacaagatcaaaaggcatgaaaacaccttattacctattttgagggttttactaactaaaaccaaggatacaacttaagaaatcaattataattatttttactaatgttcacgttgaaaatgtataagaaatcacaatgggacactgataacaatttttaataaaggttttacacttttaattgattagagcatggctgtgtagatagcaaagccatcaaggcatttgccttagacctattgagaatgcaatataaatgtacatcacaacacaataaaatagttatattattttttaatattctaataattaatggtgaaagaggcaaataattaaaagtgaaattggaaggtgtaggataatgaattgcaacaaacatacatgtacccacacatatatatgagaacaacttaattataaaacattaataaatgattttatagtgactatatcttaagcaaactctaatgatgaccgacgccctaattttcacaagaagcccccatggccatgagcctactttgctaatgctaacaaccaaaacaacatattataatatagatgcattgacctttctccttgatgcccgactcacacacattgttcactgaaacattatatacctaatttcaatttttaaacgttttccgtattgaaaatttgaaactattgccactcagcattaaatcctaaggtttccaacgtgatcactaaacctaccacctcatcattgagttccattgttatacatttgtttcgatacatatcttcaattattacgtataagaaaaaaaacctacccccatctctccccgttaaacttcatagtagataattattattatttatccattagagagctcaacacataaattaaaaaaacataaacaatatcttcatttatattaagattatttttaattttcttaatataacttctattattatttttctttcaattttatgataagtgtgcaaaatatttaacaattaggtagaaaaatataattagaaaagtaaacattaaagttagcatgtgttaattaaaagttgaaaagttaatagtcaattgaaaattgaaagtttttaagctattttattaaatatgtgataaattaactgttgtagtaactaaaaaattaacataatatattttaaaagataaaaataaatcgaataaatattttaagcattaaaaaataaaaattaaaaattaacgtttcaaacaaatattaaaagctataaaaaacggtagaaattattttaaaaaaattgtttatcaaacaatttttttaactaataaaaaaaactaaataacagctgaaatgatttccagtaataaccatagccttaatccttcatttacctttagacgcaacacgactagatataacattttttttaaaaatgttgaaaagaattaatgaattctccatccccgataaatttgggtagccccatatggatatgactgacccacaagagcttggaattttttattttattattttgggttgagaagaccaagattttgttttaaatttcaagtggaacgcaactcatggcactggaaatttgcaagatttgaataaactcctctgctatcctattaagtagcactcagagaggatcaagcataatgccaccccttgagggttgtttattgtttaattttaagagacagttgggaacaacgaaatttacatggttttatttacttcacaaaatctttgcttattcaacattcatgtatataagttgattaatttacagtctcattttgttacaacttgttgaaagaaagcattttggcaccatttgtgaatgaatctaatcatccacgacaaggttgccgtgtgagatcctttcataaacgacagagtcaccaatgataggactgaacaaattgcttgacctgacatgtctatgcactcaggacacatgaactaattaatcatataataacataaatatatttattatactatatgataaatcatcttctaccctgacccttagttttgtttccattagaacgcacatgattagcggttagtgctgttaaattgatattcccataaacttccatttaattatgattgtactaatattaaataatttaaattcacatgcatgtacaagacggatagaaggatgcaaaagaattaattcgacaaatctaatgaggaccattaatcatttaatattgtcaagaatgaggggtttctccttaggacggcgaatggtgattgtgtgaccaccataattggggcacatgttaatgctaggatccccaccaaccaattataattaatctcacattgcatatgatgtaacattcaaaatattagtatcatatagagcagcatgaataatatacatataagtcaagtacttggttcattggttggataaaaagcaaaacaagataacctatatgtacaatatttcttctcaataattaaaacatgtacatgattttggttcctccttttaccctttttcaccattcttcacaataggataagcaattaagaattgaatcatttatctagcagaaagtccagataaggtcatgtcaagttgctctcaagcatttatatgtgtcacagtatttctgtgccaaaccttttaaatgacactatgtacaattcctgtcctatataccataatgatgcaaacaaggaactattttcttttctccatcaaagttgaaactacgccatagttgattcaatcccaaccaattatgccacacatcaaaacgatgcatgtgtagaatgtttgtatgagggctttaatttctgataatgatcacaatgtatcacaagtgatacatgccccctacagaggtggtagctgaagaaacacgtggagtcattattgaaaaacacggaaggtagtagagaaagagagatttgctacctgagcttaatttacggttggtgatataacaagttgtaatgggcaatgtggctgcctaaggtacacgaatgaaatatcatacatttttatgtatgtatgattatatatctatgtacgacatattttgatctggctatagagaagaaaaattgaagggtccaatatgtttttaattattatgatttccaaagcaattctcataaagaaaaatgtaacattttcttagcattggcaatggtaagtaagggaacatcacaaattttcagctgcttctattgatcaggtttgattttttcttcttcaattgacaaggaaatgaggctaggattttagagcttgattttaaaagattgatgaagcaacctaacaagttttcttattgtccttttgcactgttgttcttcagttcagcaacaatgcaacatcatcgtgttgtcatttgaaacatggacaaaaaatgggcatgttattggggactataattagaagtgacttgaaaggcagatacaaccatttcaaacttatgggccattgttccataaaatgagaaggtaaaagtcacggttaatagataagctgtctgaatccagctgtggctttaatgttagacaaattatatgtcaaatttaattaatatttcaatcataaagtgacatggatgttaacaccatatattaattagcatgagattattccagttcagctagatcagtctttttgaatccgaattccgagtatatacttataagattgtctccgtgaataattgacaactatgttaaatttttttatttttataacaattactttaatgattatgttgaaaatatttttaataattaataatataaaaaaatttatacgacagtgcatgaaacttaaagtcaattatacattaaaaaaatgaaaagaggaggtatacagcaaatggagtgaacacggaagattgaaaagagtgacaatacatttttatagattattgccttattataacatataagtttatccaaacggagagatatttgataaatgacaatatttttttcattatttaaagtatttgtgttaataattaacatattttcatcttcatcaccaatattgtctcgcatatttccacaagcacatttcttttttcatttccttcctcaatcgtgacaacattaatttttttactaaagtatttgatttctaaaaaactgataaaaagtccacaattaactaaaacctaaagctataattacctaaaatatctttttggttacaaagtaaaaatatttatataattaattcaatcatataaaaatattctttatatcattttccatatttcaactactttaataattaattttattaagtacttctaatttaataatctaactaaaaattaatattttaaatttcagttagcatttgttttctctccaacgagccctgctgagaacaaccccatcacctaggatcttaacaagatcaccccagcacttttccacgtgaaattaacttgttagtggaattttcccttttcagggggtttgggtggtggggaggttgtgatttgcattatatgatacttggaatttaagtttttatcagtgtcacctagcataggccactataatattctttgcatagtttatatgaggattttgttgttaaaaatactgtttctcacattcacacagtatctatctctttccatacaggtccatagtgctgttattaaatcatgatgcttttgaataaatggaaggaaccaatatcttgttgtcattaactccaccctgttaatcaaattaaaagtggaatatgaacattgattaccactgaattgctcacttggtatggctctcaagcatcctcaaacttccttttttttggctcagcatattcaaattcctaatagcaaatgaactgtatagtggggcaaataattaagcacttctccgagttgaatttttcctggtctcattaatttacataactttaacttcttcatgcatggggagtaattaaaccacgtcatatactcccaatgaaggggcaaaaacccacttacattctagcctaggttttcaaaaatcactactgctacaataggacttcaatatttcagtttttattttctagtttcttcagctaaaaatttgcaagtttaatgactatgacactatgatgagtgagaacataacctaataaccttcgttaatcacagaaagaacactataattagtcaaaaatatcatccacaaattgatgtttggctctacaattctttcttagttatcacagcaagttaataaaactggtggttacttgcccttgtcattggcaaggaagaaaatctgatcttacaatctttaacatgatgatgtgcacttggatggttcctttttctttcaatatttgttttcacctaatgaacaaattatatactgttttttttttcctaaacaataatgacaataaattttaagtttaagacctcgggtaaactaggtgaaccatcactactaagttgattctagcagtttgatttgaacattgacatactaggactaggttaaaacagggttaaataatcataccaagaaacttacaagtgtaactttatatcacatatgggtaagaatattccaaacaagtgacatccaacttcaataaatcaataattgatacgcaacctcgccagtacagcttttctccactattaggtaatgattacaattaatccttccaacactatcactttcattttaagattctggattatatcccttacttttctttcaagattctggatttggattatatatatatatcttagacaatactccaaagtctcccttcatcactgtcccaaaaaaacaaaaatcaagagaaagatgaaaagggggcatcaagttttaaccaaagccagaaacttcactatgagagaggtatagcaattgattgaggaaaccaatgtgtgaaacctcttttttttatatatacttggatgaactagtacatagtaacatatatggatgtgatcaaattactggaaaatagtatccaaagaaacatttggagaaaataataatgcatttatcattcatgcataaacaaaaacgtaagtttcccgcttctgtaatataatacaatagtatatcaaccatttccctcatgattctagctacctctaacagctatgcgcactaatgtcaaaaggtttctcatgtaaatgttgtgtttccttcagagggaacgccatcatattggcatattgccattcctcagagcataattaaattaaataaacattataatccatagaatctggaagaaatgacaaactaccatcagtgtacttcgataattatttaatacttttggtcgataattaatcttgctctaacctgggaataattataatccatcatgcactactaacaatgtttaaactaataaatcataaagtctgattagtattgacaaccataaagttcaacagtactaatcagaagtcaagagaaatcgacaataatgcaatttcgtatgtatatcttgcaataagatgcattaaaaattgataaaaaaaaaaaaacctgcgataatttggcagtgcacaccaactctaagattattgcttctattgctagtatcatattttaaagcaaaagaatgaaagtgaaggttaccagaatctggctagtctcagacccataaatatcattgccgctataaaaaaaagatgtacaattatttccataaacatgattagtttcacaaagttaacatatctagtggaggtatatttatagtttttttttcccatttggcgtggtttacctcatagaccacatttcttaaaatttattatttatctgaggtaaagacagatttctgaccataccatatacacacagaatttggttttactgtataaaatataatattccttgattgccgttttcctgataaagaatgaaaattatgtcacctactactaatatcacgtttgggttttacaataatagagagaaatgcttctttagtttcccccccttttctaaatgctcgctaagttttcaatgaaaattactatgattcttctaaatattaatgactcctccaacagacacctacatacgaacaaccagtgactaatgagcaagcgagaaacaaaccatttttgtgccatcttgtactcacatacgctaatcaaaataaactctcaatattcacccaaaaaaaatcaactatcaatacggatcataccattcaaagagtttatttaagcaattgatcaacgccaaagtaatgctaaagattgtggtttgaagatgaaaatttccagttacaacgtatatgatatggcaattagaaaaaagaaattttctgaccttcgtaaccctaacttaaaaatactgacaaattttagcaaaactagtttaccataagagcaagaaactccattgcacaatacaactccctaactgtagtatcaacagacaaccctgctcagatcatgtcacttttagaaccgtttagcatcagcagttaaagtaaactttatttactatcgtagcccaaaagtttggaccggagtgctcaacgttcaatcaatcaattcatttgcttttataaatactgaacttgattcgtttgacatcctagtatttttcttattttggtaatatatcaatttatgtaaatgttcaatgccatgtgaatagctatatttgccgctagacatgggaatctgtcaaataatcgtacaggcttattgtgaagacccccattactagaatacatatgttcatacaggaaccacttcaatgcaagctagagaggcacagatcatgttccgtgtaatgtagataacaaggaagaatggagcaaataataacaaaaaaagaccgggaaaaaatattaggtatgttacacgatcctcatgccccacaaaatcaaatgacatgctgtagaacccaatatatttgtacaacttgagtaatcatgaaaatgtgcaattttttcgatttatttgccatcttgatatctgtacagtaaaacaaagataactttatatccgcttagtatgttctttcttctcaatttcatagacacgttattttctaattggatcacgacatcccctatatttgtttgaagttattgattagccattctcgacaatcccaaaacaagatggattgcaccaataatcaatcctagaacataatcaaagtacttcggtccagatgtggaaaaaaattatataatgaataaaaattaaaaataaaaagcctataacctgtcacaactaatatccaaccagattttaataaccttacccaaagcatttgctgacccattttcaaacccgtaaaatgaaataatgtctgttcaagatttaaagaaaaacatgaaagaaaagaatgggcgagtgatgtaaatcacaaatatagtgttagaaccgtatgttggctgtaacagatgttcaatttgtccaaaacaaacagattcctacaatgattacagactccacaaacactaaccttccaatgtagcttcatatgatattatagtggtaacaaattaacataataccacgagaaactcttaagggccataaaaacaaataacagcagaagggcgataaaccaccaatgcccgggaattcagtcatatcatcatcctttgcttttccctctccggatccaacaataaaactttgatcagacaacaagcagtccaggatagcctaactcctgcttttggacttttccatggccctgggagctgaggcaagaaaatctacttaagcaaactgaggcacattatttgaaatttattaatgatcttggccctgtattagtttataagaaacacaagttttaaagttaccagaaattttttgttcttggccctgtattattattgatatataatgttgtaaatattccataagatagcatatattgatgtttgtctagattcaagtgatacaatatcataatctgcgccaggttatatagttcttagacatagacattgtgtgtcattctcaagttaaccaggtcacaatctattagttcatgtaagtcttccatatcaggtatactgagtgactgacggtaaaatgagaatacatacctaaaccaatggcatcagaacctttcataattttcagccttttgcaagtgtcaatgaacattctgcaacaaaagtagaatttgcagttgtgtatgaaggatgcaaaccagtagggcaaagtaaaaatctcatcccatgagttattcagttcattcttttggtacaaacgcagaataatctgcttgaacacttaatgtcaccataaaaaagcacaagcacattaacacaagccaacaggtaatatagctgaattagacttaaatatcctattcagctgcaagaaccatggccatgatcaaatgtatgtgctgataaaaaaaatgatcaaatgtatgtattgatgaaaaagcatagtcatgatcaaacatttgatgtatgagctatatcagattgaagaacatgtttatagcagacaccaacatttgatcatgactatgcttttttcatcaatacatacatgtgatcgatcgtgaccatggttcttgcagctgaataggatatttaagtctaattcagctatattaattgtcactccacccaaccgttgtgaacacaactttgtggttaattgagagtttgccagcatgcatgagctatgtcattttatgaatcacatttggtcaaaatagcatatttcgcattttaaatatgttatgcacaaacaacttgttctcggttgccacggagtggctgctatttcatagaaataatacccactttgtatccatcatattttataattccgttcttatgactacaataattagtttggagaaaaaataatacacaagagcagaagtaaatgaattcttgtacttaaacttttattaatcaaacagttgcttacctatctaggtgattgcaaagtacaaaaggtcaaaaaaaaattcaagaattactgataaagtgagacttcttggacttcaggaaatacttcaaaaataaaaattaataacagtatcaatgtttcattgcacggtttcagcaagcatataaccaatcacggggcccagtgttcaaaaaacacaagcaattaattgtctaaaccacaaatagatctaggggtacgactcttaaccaaaatgacccccaataaatttttcaattaggaaattgtttgattcttggcaaatggtgctaaagcacctttaaaaataatctcagaaattatagttactattactagaaaatataaatgaaaagacaaaaatgacacaacacagggagaaacttactcccatggtacatcccctacaagcatccaatctccatctttatcttcataagtgagaacatactcagaaccatgcagaagatccctcaacttgctctcactcaacatttctcttcctggagctccatgggaaccacactgacctgattgtacacaagcaccgaacaattatttcagaataaaattaaagtaaccatcaaggtaaatattaatttaaaacaaatcattagttaaagtcaattttactgctaaagttaatagaattgcaacagctcacctagggtaaaacagcttaggaacatcttctcaagggcagatgatagttcctgataagttgtataacttcttagatctaccttcctaagatacggagcaccatccatgctgaccttcacaaagagtgcgccaacacctggtttcccatccacttcatcattgttcttgttagttgtcgtggccatcgagtttttcctaaaagatcttataggaggccaaccaacaacctgtgccctgtcatacaagagattttactgtattagcaaaaggaaatcccatataaggtgcttgtccaacttatagtttctcaagaattatggatacttgagctggcagattccacttacttagaagccggtgcgctgccactgatggaagcacctgtatggttatgaccggttccattcttagttgaacagggcctttcttgcaacttgcttggtatttctttcatagcagaaggctgagctccagaaggcctaggtgatagcattgcgttcatccctgtattaccagcgaacttcccctgcacaaaggatcgtgaggaaccaatatcagacactgctaaaaaaataccatttctcacaatatggaaaacttcaagcttctcttctcacctgagaaaacccatccatggtatcagcaaaacctcttttgttgccagaaacaacagttttttgcgccgacaagcaaatcccgtctttagtaggaagcaaagggaacagtggcttctcatcaagctttgctgggcttaaagagaaaagatccggctccctttcaggcgattgggatccgggaagacccagcctcaactctgtagccttcaaattcatgttctcctttttctcatcacacaagcttggcacagtagaggcactgctatcaactgatgagcaatcagataaccctaagtaatttcgttctttcaatccagccccattctgagagaaacggtccaaggattgcgaagaaccggacgccacggtcgacgacacgttgctccgcccctcctcctccgttaccaccgccggcggcgacatcatactccaaacacacaaacaaaccaaactgccacacacagagaaaccgtaaaagtcaaaaccaccgtccacttcacatattaccagcaacacaaaaacgctatgctaataacaaaaccaacgcaaaactccattataaaaggaaaaaatattcgttgcataatgaaaattgcctcaaccatagtgatcacgccatttatgagcaacttaatcaacaattaatcacagaatattgctgcagagtcagaaattaaaaattaaaaattaaaattaaaacatgcatgcgttatactattcaagagtttaagcgcaaaaacaaataatcacaacaacaggaacaaaaaattaggacacgtaaacaaccttttgagttagtaattaactgaaaacttatgacaatagcacacgccgctctcttttcctgtttctagttcagctttcttcataacctcagtttcttccgcaaataaaaaaataaaaaagcttaatagatccacattcacacaaaatccttaccgagtttttttaaaagaaaaaacaaaatgtcgtgcattgttctaccagaaagtgctgagaaacagaaacgcgcagagaatttgaaaaaagaagagcagttaggagtaggagaagatgaatttgaagtacgcaccaaggagaatttgaagctttgagagatcagagacagaagaaaaccgattttggttctgaggattttttttttcacaagaaaatgcaaaagtgagaaagtgaagcagagagagagagagaaagaaagtttaagggccttccatatacagaaagaagcaaaagcttttggggagagagaaatagaaatgagaagagaaagcttaatgaatgaaaccttaagacggaaaaaccagataagagcacgcaataatctataactattaataaacataattattttctttgatatacatattttattaaattattttattcttaaattattttttaaatttcaaatttttcttctattttttattaacttcctactacttttatattattaatttttatattctatcattttttattaattatatttaacttctatttttacttattatttataaaatttagaaaggtccggaattcccctactaataataataatagtacaagttgaaacgacggagagtggcaaaacggaaaatatggactcaggcagtgtcgttttgttagtttgataacaatgataatgatatggactcgggaatttgcgttggacgcttgcgattggttctgatggagaaatcaaaaccgtccattctctcgcgctatatggacacacgaaattaaatatcttgtcgctgttaacaggtgctaagaattatgggtctgaccctcgttcccgtttggaatttcgaaatgtcgtttttacccttatgtgtttatgcattgtgaacgaaaatataacctttttttttattaaacttggtgcagatagtaatgaatggatttatttaaaaagaaaaaaaatggtagtcaacgtgcttgtgattgaaattggcacaaatataaatctagtgtgaatggatcggtttattaagttttttttttgtggtttttaacttaaaaaattgtgatttaaaaataattcagaacattggaaaaggaaataaaagtggaattaactcttctgataaacatgaaatgatagagctgtctctttcgttgacaaaaagcatataagcatgaaatagcatttgattagaggcacaatgtaagaagtgtgcgagaaaataaaactgtggatgaaagtatagattaaaaacaaaattcatactgcatatataaaagtattactccaaattgatttggataggttggctttaaaaaaaccaaatcaagattatttaattgaaataatttttatgatattgaactaaaaaaatccaattttttttcttttaattagatataaattaaaaaaatcaaataaagaatcaaactaatagggttattaatgttgtccaattatgaaaaaattgattaaagtccttgaaccgttaatgtatgttaaattgaaacagcatgaaagaataaaatgagattgaagatgaatgtacaaccgtgaggaagaaatgtaaatacgtagttaatagttaattaactatattacttttcgggaagtaatcattaaaaaaaattgtttgagactttgagtatgttgaagagttggactcactctcacacacacatttttatgtttgctattgttatatattttatttgtattaaaaaagttaacttttgtgaggaattaatttatgtgtaaattttaaaaatttgttattaaagttttattgatgcttatataagtgagattattaaattttgtcactaataaattattttcatatgacagtaagacgcacggaattaagtttttcttaataaaataattattgacatatttgaatttttatttacatgtttaaatttgcttttaagtgaacaaagtcagattttactgtatttttatatttaatttgttatgttagaactgaaattatttaattcatgaatattataagtaactaatataaattttgcaaactagttaaagtatacaaacaattaaaatgagtgatacacttttttttatctcaaaccatgttactcaatatatatatatatatatatatatatatataacactgaagcaaaggaaattaagcattgatccattgggattcaaaagtcaagctcattttcactatcactatttttctttggcgtgcttttgttttctgctgaaaatatcacgatgaaaataccagctgagaaaaaagtgcttatcctgttgaataatttttaatcttcatataaattttcgtattacaatttatgttgttttataaatcctctattatcttttatgataaattttaaatatttttatatttttaagacaataaatacttttattgttcatttaatacttatcataaaagataatagaaaaaattcatagaatataataagagaatttaacattgctcttatactatatagagtgttacattatctctccgaaccaatgagtactgttttatttttaaggtaagggtggggtgtgtggaaatacataaatacttccagcaaatttcttgaagatcacatttccttttatatggtttcagttaaaatcataaccattttttcataatgatttataattaaacaatattattattatagtatgtgggtattacactgtaccatgtccatggcaaaggtatccgaggaacaaccctgggcatagcatagctgagagtttacggacatagtaaataattactgcagggggaatcatagcataatcctctctgattcacacacaatttcagatctctgcttctgccaagtcaacaataccataatcttctgtctcacacattcaattcaatgtcgggttctcactcaaatcacctacctaatactatcactattgtgttgttctcataaatcataactagacaaaaatatatcacataaaaatgtttatgatggattaagaatcttaactatctatgaaagtttcatccactcaggacaaggataacacatccacaaaaccagcattcaaattaaattatcttccaatactattaaaagagattaatactcttacaaaatagtattaaataagattcacggtagtatttaattcgttcgtgttcattcctaaaatgttctcatcttgaacctgctaatttttatttattagaatgccgtacttctattgattttggagtggttttaaatgttccacctgtcgaaaagcatgaggcgtcatgtcatatcatatcatatcatatcatatattataataaaaccatatttttgaagtttagtaccagattcgatgttaaataataaaccatcgaccaatgtccaactgaaggcatcattcagtttcatgttcttacattgttgtaagacaatatgctgtttgtgatttgtaccttcatttcttttaatagtggtgctttgatataacatatttttgagatttttttctccaggtagttactttgcaaaaatatataaatatttgctgacaaaacactgttgcctgtgacttgtttggctcctgacaatgttaccagaactgtaatccagcggtttataaaaataaacatagcatatgttgtggagtttttttttttactgctgttatggagtttatttaatggaattttactttattatttaaccataacagtatattagtaagaatatattttttatatataaaaatgtaatgtaataaaaaaaagaataattacaaaacaagaatcatcttatatagtgatatttgttgagtcagatcatgattagaaggagtcaaatataattaaatggaaagtgcagggggtgaggtgggaaaagttgataaaaaaggagaaagagagagagagagagagagaaagtaagtgggtggaagcaaagcaaaggaatggcagaaaaaaaaatgagatgagaagagaaaggggacagaagaaaacaggattgcggcaattgaaatgcgtttgccgggtgcttagcgagacagataacagcctccactctcatcaccccatcttttttcatcattaccaactctctctctcagatatgtttcatacctatcctacccctctacgctttccagctatcaccatttctcatttttcacaaaaccatatatcatcaccatacgtcactcctcactagtttaaactcctaataatcgccctaaaaaacaatattactactagataatcatgtctcagctagctttattcatctgaaatgaggccgttaatttcgaaatgaataatgacatataaatattttattattttaaatatttcatcaaaatttatcaatatttttatttttttttattatattttaaattctattaaatctatatatttttttctctccctacctgttgaataggtgataagagtgttcatgtaacattatttttcttcataaatcttgataatatctgagagttttgttaatttcgttaatccattatgtaaacaactagtttttaagtataatactctcttgcagtaaaacaaagtatgttactcttttttgtttaaaattggttgtcatttttagattttctttattactgatatttttaaatatttatcattttaaaaacaaaaaatatttattattttgtgatatttccattttaaaatttctcatttgaataccttaccaatttcaaataaaattcttagtaaaaaagttatttttattaaaatatccattttaattcaataaataaatcgtttaaaatagaagatgtaatgactaaaacattctacactgactattgcaaccatcttattgtattgcacaaccatcataattcataaaggcataataaaaatgtgattacgagtattgagcccataggcctagacatgaaggtttcataccattttctcaaatgtgattaaggcacgatagatatcaccttccccctcacacacgaaaatgacacaaaatacactatcctcctaaaaatgcaagaattgttacaagtaagtttgagagcatactccacaaataattgatagttttattttttttgggtaatttgatctttaataattttgtcacgccaatgattagccagaaaaccagcccttattcatcgtgttttaattattgtgtttagttaatgaatgcataggtattgatagggttgagaaggaaatggtgggcatggattcatgagaatgacaagggataaggttatggatggggatagcattagattagattagtgaatgaaatgccagaaaagaaaaacgtaatactaacaaaatactacattgatttatggaacctaaataaaaataattggagaattaataattggacattattagacatattaatattccaagaaaggaaataaaaattgaaaagatttgctttcattaggagccacaggttttgcggggatgtggtacgacacagggtcccaatgccggaaggactccgcttttgtcgctaccccatttcgtattagtatgttttttttaagggttaatcagattaaaaaaataaaagaaaaaatatttttttattcatatataaaaaatttaatttatattaattaaaaaagttagttgatattaattatttttttaattttaagtaaaatgtaaagttatttttaaaatatattttattgaaacttgatataatgaataaaaaggaattattaaaaataaaatcagaattaaattaaaaatattttaaaaatgatatcattatataggataaaattagtaagatttatttatatttaaatttaatatataaaattacttttttatatatatatatatgaattcagataaaatatttattatagaaataggtcataggaaaaaataaaaaaaaattatgaataatataattttgttcattccaaaaaaatatttttcttttgacaaataacaatcaatattctaaagacgttagctaaagactttaaagtataaatatttttattagaaagtagaaaattatagtgtttataatttattttttatgcttttctattatgtatatagtaaatatgaattattttagtttcataatcaatcttctaatatatataattgtaacggtgaggttgagggtgaggcgtttgatgaagcgaaaaagggtggaatagtggattaatggcgttggagatataaacggagtttgagaaagtggcacgtgggtggctcgtgactggcagagaaagcaacaaggcagtagggtcaaaaggactttttatatgttttgtggcgaatgaaacaggtggggtccatcctaaattcctagtctagactcacgtgtgaaggctttaattcgtgactagcgtgcaccaatctatgctctacggtttttagtttctgttcggtctctctcccacacaccccaatgctttttaacccactatataactacatatccagatttcaacgcgatatctcatgttagtatttacctagggtaaatgcatttaccattcaagcaaatcctgttcatatacaattataagttagtacaacccagtgtaaagcattaaccttcagtttctctagtcatgggtttgatttgaagttgtgcaagatagttatgacatgtaaaatagtataacgaatttcatgtaagcactaaatactactacacaaatggcaagttgttggtttaaatggttaactatatttttttttttctgacaagttttggtttacatcttgcaagtttgcctttgctctatagaaatatggcccaagtccacacacatggcccaaacattgttacaaaagaaggagacccaatttgttgtggttagcaaataaaaaaatcttggtatccatctcttaaaattaggacttgggtgattaggtccgtgaaagtctaacaggcaccttggacttcccacaagatgtctattaccactgaaattaagactaaagaaatcttacttatcaccacccttaataagagagtcccaattttttaacattcccacgggaacaaacactctattaacacttttttattttttttatctcctttttatcacactacattataaattaaatcaatcacttatctctactttcttcttatatctcactaggtgtagaatccaaaaggatgtccaaacattatttctcctaataaaaagacgaatacatatatgcatctttcctaggttaacatgttcggtgaatgacttgtggatagttcgattatggcttcaacaaaattgataccatggtaagaaaatgtgggtatttacataaaacattatgacgcttaagtcaattatatgatttcattatagcaacaatatctatgaaatgtttatttagtacaatgacattagtggtatgtacaagagtcaaagatgaattgaatttcttaacaaaagtcccaatgtaaacaataatatcttgttttgatacaacaatgaaataacttaggtgatgagtgattcattattcgcttttatatatatgtttatgttcttgttaattgtgttgacctcaatcaacacttgtgatttttggcttgtccaatgtttaagcttgtaagtgttattattcagattgagcttaagctcaaacagtaagaatattatttcattgcaaaaaaatgagggctcaaatttgttgtagaaggataaataatcattcaccaaatttctttttctttttacaagttctctttattttattttattttatagtctcataattactatacaagtattttttttacatattatcaagataagttatcattgattttacatacaaaatgagaaatggaagttttctatttttatattaattatctgaaaggaaagaaaaataatttggaataattccatgcataaaataatatatgttaaaaaggatcaactttttaaatagataattactatcaatcaaaaatatatttgagcttcaccaaataaataaaaatgtattcaaattttttattataaaatgcacaaaatttgcaccattaatcaacaaatattaattattagtattgttaatttttgttagtaggaaaattcgaacccgcaacttcttctcctttcatcactagaccttcaaaaattcttatatgccctttctatccttcttcttcctctctcccaccacctcctccatgtctcattaaccttccaaccaaataacttaaaattagcaaattcttgacctcccaaactcaagaagttcaaccatgtgattaaagacttattttgtccaaaatttcttgcacatgtaacatatgacatacatcactttcattgtcatctagtttctgaggcttagatgctcacaattgattcctagttgcttacctattaaatgatattcacatgattaaacagactcgttttatccagacttttttgttggggatcaaccttatatctccaatgcatactattcatttgatcaaaatattaaatgggtgaaaagcataaataggtcaatttcctaatctagaaaaatagctacttttcatgaattagcttttgtacaagaaacattaaacacaaataagtgattttcgtcaaatctcctttagtatttttctaatttttaattaatattcatttatttataagaaaaatgacatattccaggttggctattcgtgctagcttttagtatgtctgacgtttatactaaacaacacaactcatctataaatttaagtcttgatcaaatcagtggacaacattcagaaaaaataaataaataaagtccgtagtatgtgtatattgcatatatatcatgtgtaatttgatttcagttatagcctactcataggtataaacgcaattcatttttttaaaattacactctccgtttcaaataatatggtggttaaggttttgatacatgtattaagaaatgaaatcaatttgttgaatttaaaaaaaaaacattaaataatttcccaatacattatttgtctctctatttaatcacttatttgtttttcttacaccatatatattacttacactaaatattgattaaaaataatcttaaaaaaatatttaatacaacattaattttataaaattacgtctattttgaaataatatttttctctaaaatatcatagactataaattaacgcaattaatgaagcataaaaaaggcacgatttatataaagtacaatgaacattaattaatagcatattttaggttcctgtttataagtgcttgaatatgtttcagttaaaggttgggctaagtggaagcatcatatactgctttgattctgtggaggattagataatggataatgccactgaagtgaaatgttcccaattagctagcatttgctcacacattgcaagacaaagcaaaaatatctgataatatagatgctcatctaatcttccaaattatacgtccacgagtccaaaaagtggtacataaagcattctctatttcagtttgtgctcacaatggtcccgaatctgattatgaagatttttttatcaataaatattaatttattaattttattagaaatatcacttgaggacttgaatctgcaatctctctcattcccttctctcttccctaatatcgggttaatcttatatctcctctaattatgaatattatagaatggaaacggagaatttatagtgaatcagttacagagcacaagaaattagaccccttgttctggcagcatttgagggaatttaggtatcatcatccacataggaacccagtctttgcttacgaagcatagtgttatggatcattgatgatattgttttgtttccctagctagtttgaaagcaagctacagtccacttgctccggctaattctttcaaaagaaaaaaaataaaggtgacatgcatattatatactgcctagcttgcctccatcatcttcaagcatgcccattcatattaatagtggccctctcaacttgaatgcaactgctatagttagtgcagccccttaaaaatatctgacataataagttttgtgtttttgttatattatgttatattttatggttgataaaagtttaagtgaattaagtatcgatacttattaagacaattgtggttggcttatcagaattaggacagatcataaaattttcacattgataataatatttaaactcaagttcttgtgaaatgtgagtcctatgtttatcaatttgactaatctttcttggcataatatattatgttatcattcggatacaaattactaatttaatttgagtcattttcaatacttattcttgagatatcaaagaatgaataccaattaattagaaagagttattatttttttcaattggttctatggattttattggacaatcatgaggatgagtatttcgatgctggtcgatctcttacatttcaagcaactggattttgatatatacctattgaattgtatcatgttttaatatattttttggtagggttacattatgctatgctaacaattaagttggggtaagttactctctttttgtttttggaatatagatatagaggaagagaaatagaaaaaagagaggacgtcttctaaaaaggtgagtaaagaagttgatttttaacagtatgtttaggatgagcggagcatgtttaaatgagtgaccaattacaggaatgatatttctttaatgaattattgatataaatctctagagaaggtattataacattggtgatcacatgtaaatatttgaattctcaaatgagctaataggatcataagcatctttttttactaaggaaaaagttaaacgtacatccaaaaaaataggtgtaaggattcatagaaggaagagagagaggaaaaataaaagaaaatttttaatagaagtaaaaaataatgtgacaagagaaataaaaaaaggaagaatgttaaataaaagagaaaataggtttataaatataaaaaccctcttctaaaagaaataattttgtttgagcctaaaacatttataatatggtagaattaactttcacaataccattttttttataaataagatttgcacttgtgatgtgtttaacgggaaagatagtgagaaaatgagagatgaaagaaaatgttgaaatttaatttgaaagtaaagttgaatgaaagaaaattttgatttttttgtttttatagacaattttccttacttttttttttcaaactttccctccaactaaataattaaaaattagattgtatccattttttagatctatttctttacctccaaccaattacttcattgaggataattaggcaaagaagaagtgatagcacacaacataacacattttttattgattatattttattaaaatatcaaaatttgtgagtcatacattttatttaatgaatctctccatatgttataatttttaacaaattttaactaataaaaaatgctaaaaaaaatgttttttaactaaaagaagaatgcttttgttaaatgtgttattaactcattggttacaacaacataattttgtattgcatacaacaacatataaacacatggtattatctgatcgtaacattgatgttatgtacattgaataattgtaattaggtatgtaattcttcccgcaacttgggatccccacggggactgtccaattcgggaccttgtggttagggaaaaattcctcacggggactgggatggggatgaaaaccccccacaactaatttggggacgggaatgggaattatgctccccgctccgtagggtccccgtattcccgcttatatagaattttagttatatatcctcataacttataatatgtataacataaatataagggttaatatagtattttactagtaaaaaaaatacaaaataaaattatcgtgtatataagtaatatctcacaagtcacaaagacacaaacattaaccaaaccctaaaacgccgcatcaaacattcagattttgtttcttgacttccttcttcactgtttcaccttcattccttcttcacttcttcactgttcgtttcaccgtttcatactgttttcaccctcttcacttcttcgcttcttcaccattaatttcactgttctttcttcattaagccttccttgcaccttaaatttattttggtatttttagtcatgttttaaacttaaaattaaaccttaaatttattattgttgaaaaattgagataaaacaaaaaaaaatatttttttataatttatggcattttttaatgtaaaatgggatcccgcaggtccctacggggagccgaaaaacggggacagagaaaaataaccctacaaagggaagtggagataggaagcaggataaggttcgaaaatgagaaacgaggaaatactccctacctttactccgcgcgtgtgtcatgcctaattgtaattatatattttttgagttaatgaagtccactctttttttatgaagtatactactatatgataacaaatataccatgtgatgatgatcataataataataggtaaagtttctgattaatcgatcttctcattcttttaaattaaaggcggctataagtgaagtgttctaaagtcaaaaaaatcgatgacggatttcgtaagcagccaaagtaagtatttgaacttcacacgacatatctaagatggtgacagtatccattaatccatgttactgtcaaccgcgactacttaacatgtcgatccatttccagaaaaaataaattgtcaatctatccattggatactaggcatattttttgataaatttttccacaaataaaagaaaaaatattaagtaatttataaattaaaattaatttacgtataaactaatttggaaaagttactgtattagtttctccaataactttttaattatgcttaagctaagttttagcttataaaaactattttttttcttttttttataagtgtttatgaaattttttattcatttctaaataggttatcatcttgttctttatatattttcttaattcatcagtttctttgttattttttttctcattttttattttattttgtatgtctgttttgttctccactagatgcaaaatcattgtccattcctctcttggacacaagaaagtaaatatgctttattttgtgatatcctcttcatcctttgcataaatcaattagaagaaaggtgctcatataacttgtcttcattttctcctaaacaaattgcaccactcttgtactctaatgacccattcttctttttttccgagcttctctacatggtgcaactaatataaaagttttttttagctgtcaccatgatatttcgagtcttctaggcatctaataattaatctctatcatattaattcattttgagatgacatgtaatatctcttattatgatttcaaagtctaaatcaaagttgaacctgaaaccttgattaaggaattcaagggttaaactaggttgctgtggcaacaacttttggtaaaataatttcaaacttgatactgtcaacacaaatctaccaaatatcattatatgtgtgatttttgggacaaaaaataaataaatatcacaccaaaataaagacactcataggaggcaacatgtaacaagcaaaccctaattaattaactacgtactacctgttactcgtacacaaaataaacttaaaaatgaattctacccttcaattgcccaacaaaaataagggaataaaaccacaaacagagaatgcaatagaaaagaagggcatgaaacacaaaacaaaggttgttataggttctcattcaacttttcaaatgcccatcaaaataacactacttatgttcctgcagtgcaaggcattgttagcaatgctagataatgaaaaacgtataaaggtcgacttccaaaattcactccacgcctcacttattgttcacagagaaacaacacctaatacgtcttagagcggggtttgaagcgcgggcaagatggcttagggttaggcaaagtgaaagagggaggaacgaaattaacatgttaaaaaggaaacacttgagtgaaaaggtggaaaatgcaacttttcactaaacattttacattttcaatttagttcttgtctatatcattttgatccttgtccacatgttcagatgttggtccaaggccagctcttcattaatttgcacataagttctatgtgggcactcctattaaggattttattaataaatgtttcaagggaactgattaaggaattaaaggaactaaagtaacagtggttgcaatttatagatttagttggtgatttactccgtataaaatttgttacgtgcgtaaattatataaaaatatatctataatataaaaaatacttggatcactatgaaaatggggtattactaaattaggatcagaaatctactcgcactctgtttaagttgtatattgaaaataaagtttacgcaaataaacagagaaataaaaataatataaaatagatatgtaactaagttaaaaaaattataaaattcgataaaattatcttacaacttttgaacagaaaattgtatgcaaacataaaagagtaagaaattaaatgagttttgaccattggagggaatttttttgagagataaagtaagacagtggtgagaatggtgtaaaaatgcccacagccttccatgccttccaatagccgcattggtttgttttttgttttttttttttattctttggttttcttggacaagcatgctgatgttgagagttaatttcctgcttaccacaattatgattttattaaaaaccaattttttatgtaccaaggagcctagcaactccaaataatattgatggcaattttgatgaaaattaaaaaagaaataattttctttaaaaataaaaaataaaaaatatcataccaaacatgcaccaaatcctctcctcgcctcggtgctaaggcataataaagcagcttttgttaacgctcatcgctgtcagtcacgaccaacaccaaacccaaatgagtccaccgaccttccgtaccacactctctctacccttttatatgtaaaaatgtttaataacactcggaatatcacttcgttatcatacactcaaaaaaaagaaaaaaaaatataaataacataaaatatataatgtgataaaaaggaacagatgaaaaaaatatttacaataaataataatttatgtatcattactttctatatatattccaactttcttccaacccaaagccacttctctcttgaatcttcattcacacaaactgatttttcttttctcttcacattcttctaaattttggccccttcttcctcaatgataccagggccactcggaaacacaacaacaacaacagcaacaagtgtgcataatggagggccaagatctctcgccacctcgcatggacacatctcgaccgtccctcggcttccccttgggcactgccctcctcttgatcatcatcttcagcctcagcggcatcttctcttgttgctaccactgggacaagttacgctccttccgtcaatctctctctcatccccaccctgctccctcccacacccaatcccaaccctacacggtacccatctctctataccctaacacgacatttttatcaaattaactatgcccatgcacatttatacaaattaagtgtatcatcataattacagtttaatactatactagaaatatgtactactagtactagtaactatatacttgtacggagtttgaattattgattataattctaattttctttttgttgtgtgcaggaggtgaagcaaagcaagggtgagagtttgccggtgttgatgcctggggatgaagtgcctaagttcatagccatgccttgcccgtgccaaccttcccggctggagactatcgttgtcaccgtcgagaagccgccgcacaaaccgccgctcgtggtggcgcctttgtgttaattaattagcatcagaagcatgttaattaattgtcgatgctgtgttacagtgtatatatatgcatgttgccaccatttgttctatgacccgctgaagacggtaaggcttagagagagggaaaaaaaaatctaaagattaaaggatgtatagtaccaggtcaattcccagattgcatgtgaccacttcatttgattccatatttgtgttgttcttctatctatgtaattattaattaattaatttaagttacttaattaaaccgttcttatttattgaaaacttccaatttggctttgagctaaaaaaaagaaaataattatgtggtataattaactatatagaaaaacagctttatatattctatagttttatcaactgtcatttagttaagtttacgaatttctcgttatcaaagcacaataattataagctaggatcaacataagccgcacattaatctttactttgtctccttggcaaaacaatacacaataaccttgtttcttttttgtcccttttctttttcgtttttgtcattttacttgttccacccatcgagctatagcaatcgtttgtgctataagattaggttagtttgtctgtcaattaattaaaaacgatggagtaaaaggctagcttctggctgacaagaatacaagttgattcgtttagtgtgccaattgcttgaaaccgcaacgcgaatatatatggttgcatgtacttgtcatgtgaacacaatatccacatataatgggtgtgagctgcatgatatatcttaattagtattgattaatcatacccactttggcgtgcaactgcatagtgcagtgcagaccctcctaaacctaaaataaaagatgaacattcaattttcacatctaacataaatcttaattagtatcttcatagtattgattaaaaatttaaaagaaaaatgatttttattgagatatgtaaaattgtataattcattatttttttattttatgttctcctataatatttataataaatatattttttaattctttaatcaaaatatcgatcctaacaacactcgttactaaaatgctagttaaaaccatattacctgacaaggatatgtcgatctcaagtaattttgcatcatcaaatccaatgagaaactaacatgtgacctaataatatatgtatacattaattattcaattaattgcgtactctaggtcccaatgagaagctgccgccacatggagtactaaaatcttatgaagattaaatattagataccataggaggcgaatcatcccatattcccattaactacgccaacggaaccaaatgacacagaagaagaaaaaaatctgcacatctattagtaatagtattggctcatcaattaactggtatacgaatgaaaagaagctaggggacgaagcgtgtatgaataagattagacctagtgggtaatgttggctactgtccccccttttcaacatacgaaagggatagatagtcctaaaactatgatgaatttatgactcgatcgcaagaattactattaatttgcagtggggcaccaaatgacctaaccgaaccaacagttctcatgacctaattttctttttttcattgtggctttaacagagctagcccgcggttttatttgttgcattggagtatcagatatgtgtaccctagcttccgtgattattgttagtacttgttactttttccatcttaaccttctcgttccatgatagttgataccctgatttcgcttgttgtattcacaagtgcccaagtgggtctgtcactatccccatatataaacacttgcccccacacaccattatacatcaatcagatattcaaaatttcaaaatgataatcattttcaaatataaaatatgtaaagtgaaagcctgacgtgctcttattttattttattttttttaaattattagatatacattaaatgtttaaacaattcacacacatataatatatatatatatatatatatatatatatatatatatatatatatatatgtatgtatatatatatatatatatatataatttattttatcaacattacattgattaaaataaaattgatttcacatttcttaaacaaaatttttaattcaagtcttattgaaaaaattatattagcttagtgaaaattttcaacaaaaattactcaattgatgggtaattggcatcaataatataataaaaaaggatatatggtttgttttattgttttaattattaaaatttaataaataatataaattttttatgtacacatatccatttttaaataataataataatatataatatgtttttccacgttaataactcaggtgatgtaaacaaagaggagcggaccttcattagctcttcattttgattttcattctcttgttttccactatttatttcatgtcctaccagagggttttcaggaagacctggaaaaaaaattataataaatctacttcaaaatgtttctctttaaaataataaataaaaattaaacaaattttaattggcaaaaaatatatttaaaatgttattgtaatatttatatttttctcaatctttttgtaaaataaaaaagataaatgataattatttttcttatttttttgtaaatgacatataaatcaaaactttttttaaaagcaacgtatatatattgagtacgagaaattaagtagtgccttatgtaaaattaatttctccttattccctttacaaggcaagaattcagggcagtttgaaatcaaggtcacttgaaacagggcaaaattaaacagcaattggtggcattttgattgagccgatagagaaatcttcttaattattgcgaaatcttaactcttgtccatttcaagcacccactcattatttttaaaaaacttaattattatctctaaatataattatagtacatcaactctttgctttaaaaatgcaaattccattgaatcaattaatatttctaaaaacatgtaaactaaatgaacatattagtacatgtgagactgaaattcaccaattcgaagtattagtttatgttaaactacaaattattagaaatacaaatgaatgaaattagctcaatattataagaatgaaaattatcagaaccaataatttgtttgttaactgtttctaaaaacagattttgttttctaaaatttagcaaatttaaaagtatttgttttgagggtcaatggcaggaaaataagagttgttatatgcgattttgctattgtagtaactgtttgagagtatagttatgcacctctagaatttaaaggaatctaaggaggatattttctacacatatatttacaaaaagtatgttgggtaaaatttatgaaaattttgaaacgtattaataattatgaagcatacattacaattattatgtaagaaaatgaatcaaattgtcattattttatgccagaccggaacacacaacagaaagggagtcaacaaaaaatacaaaagaaagagaaaaaaaatgcaaagaacaaaactgatatataacatttagagagtaggagttgaagttgacatcctaaaatactgtataagtttaatttaatatctgtaataataattttatctattgctacttgaagtggtaaagaaaagggcttatatataccagccatgctcctgcagtcctgctcaacaaactatctaataatgagttgggaaaaaattgcgaaaagacaaatgctagtagctagagatcagagcataatttttccatggccgagggagtcatttgattattatgcttatgtagcaaatacatatatggaaggagatccacttactcaaagaataactttttaaagagttattttcaatctaaaacctttgttttattttaagattaatgcatgagattaaccatttaaatctttgcacgtgaccctagtggttaagaggcttaacgtttgaattaccaagtgctactccatcttcctgctattgtccgccgctgtcgtcgcctaactcattgcatcgctctatcttaccgttgttgttgtgcaatatctctccaagaatagacatgcagctttccaccacctttgttgcaatgctgcaggtattgttctgctattctcaacattttattgtgtcgttgtcaaccaccgccatcactttgctatatcaccatgacaaaatgttacgggattattgcttctctgtcatactctttcccttgtagataagagaaaatttgttgggaatctaatgtcagtaaaatgatgctggctaatcatccattaacatccatttcttagttaaagttcaaaaacagttcagtaacccaactaagagctagggaggggtgtgcaaaagaaccaattcatattataactcaacctaaatcaaattgatttttttttcaaattaattaaaaaaaagtatactattttataaaatcaatttgattaatcgaattatttttataaaaccaattggattaatcaaattaattttcacttgaatatttatttttatttgaaaaataccaattcgaaagccaattcaaaattgatctgattcttatcataattttaaaattgattaaaaacaaatttgattcagaatcatttttttaaaatcaattcaattctgaactgattttcaaactaatttaactatttgaatataaaattaaatcagctaaaacagtttaaaactaattagattcaagttttttatcgaattaatttttgcacacccctgctaagagataaccacagtatagcttgtttggtcacctcaaatttgcattttgctaattgtcatttttatgatgtttcttaaggagccaatgtttgaattttcaattcagtagaggtgtaaagaagtaaatttagaaaaactagattgatgtttgagtacatttgcagtaccgaaaggaaaataatcatagtagccttctattttattttgccactgcaatgttgttggaggaatcgcatccagcgcagatgataactgctaaataattgtgaatttataggagttaaatagtcaaattttggcttaaaattaattatttagcagttatttgtaattaaaagtgagaaaattaatttaaattgaatttctggttgcagatacgaaaaataaggttgcatttagcaaaagtggtacagaaaggaagaaaaaaaaagaaattctgaagcaggcccaatccaataggggcgctaagcgcgcatcagacgctaagcgagcaactaactgcaggcgctgagcgtggcgttaagcacgaaggtggaaaccgttacgcgcgctaagcccagctaggcgcccagcgcccgatccaacagaagcacaggcccagcgtgcatgacgcgcccaacgcgcgatctgaacgcgctaagcgcgaggtgtggcgctgagcgcgactacgaaggcccataagcccacttcagcaactataaatagagaggcagtctcaaggaagcatcatcccatctcagagcatcactctcagtacttcaagcctgagttttcttccctctctacattctttgttttgttagcctagcttttctttcattcccagttgtaagccctcaatggccatgagtggctaaacccctagctagggcctggcaggcctaaaaagccaacgatgtacaatgagcttcaagagttatcaatgcaaaggaatttattctaggtttttctgttctatttcttttcttttattcttgcattcattcttagatctctttttgggttttaatcgctcgggagagggtaattctcaataatatttaagatccaatgcatgcatcagttttaggggttatacgcttgggaaagggtaacacctaatagaacatctaaagaaaagaatcattgggttgacattgctaggcatagaatgataactcactgcccatgcatctaagcaacatctagaacttaatcttaacgcattttaattattgaatgttcgcaaaggcatttgggagataggtagttaaaataggcttgccaacgtgaggcatcaggggcaagtagtcaacagatgtgggtagaattaacactatttcattggtaatgaatatcatacttacatgcatcgtaggccaattgggtttgtctggtcttggcatttctatcaattgttttcccttttacttatttgttttagtaatagcactctttactattcctactttcatttctactttactactttactcccacttacaaattgagaggtattggaaaagtgcaataaaatccctgcggacacgacactcggacttccgagctttactacttgtcacgatttggtgcacttgccaaagtcttaacaagtttttggcgccgttgccgaggattttattttcgcacttaatactatatcagtttgtaagcctaacttttcttttcttggcttactttatcagtattttctctttacttctattctttctttctttcctctataattgcacgggtagtgccttcttatttttatgcgacttaggactgcatctggagacgtggtccctatcaacttggaaatcgaagccacttgtcggcgtaacaatgctgcaagaagaagaagggaacaggacactgaaggaagcagtcacacatcacctcctctctctccacatcacgctgaaatggacggggaacaggcacgaagagtcaccttagaagacttctccaacactgccactcctcagttcttcacaagtattgcaagaccggaggtgcaagccgcaaatatctcctacccgtattcccttatccagcttattcaagggaatctcttccatggtcttccaagcgaagatccatatgctcaccttgcctcgtacatcgaaatatgcaacaccgtaaagatcgctggagtcccagaagatgcggtacgccttaacctcttctctttttctctagcaggagaggcaaaacgatggttgcactccttcaaaggcaacagcttaagaacctggaaagaagtagtggaaaagtttttaaagaagtacttcccagagtcgaagaccgccgaagggaaaatggagatttcctccttccaccaatttccggatgagtcccttagcgaagcactagaccgttttcacgggctgttacgaaagacaccgacacacggatatagcgagccggtacaactgaatatattcatcgatggcttgcgaccccactcgaaacagctactagacgcgtccgcagggggaaaaatcaagttgaagactccggaggaagcaatggagctcatcgagaacatggcggccagtgatcaagcaatccttcgtgatcgaagctatgtgcctacaaaaagaagccttttggaacttggcacgcaagacgcgacattggcacagaacaagctgttgacgaggcagattaaagcccttaccgaaaccctcagcaaactacctcaacagttacaagcggtaagttcttctcactcatctgttttgcagatagaaggatgccccacatgcgaggaacccatgagcctggacagtgtgtaggccaacaggatacttctcgagaagtaaactatatgggcgtaccaaatcgcggatatcagggttacaaccaagggaactcatctggattccaccaagggggagcaggattcaatcatgggccaccaggattcaatcaaggaaggaactccacgcaaggttcagggtggaggaatcagggaaaccagtacaaggagcagaggaatcaacaaccgtaccaaccgccataccagcatcctagccagggccccaatcagcaagacaagcccaccaacatagaagagctcttgctgcaattcatccaggagacacggtcccatcagaagagcacggatgcaaccattcggaatctggaagttcaaatgggccaattggcacaagacaaagctgaaagacccactagaactttcggggctaacacagagaagaatccaaaagaagaatgcaaggccgtgctaactcgagggcagaggaaagcacaagaggaaggtaaggttgaggaagaagaccagacagaggaagataagacagagacacaggaggacaggacagaagtcgaagagagggtggcatcaccacctaagacaaagagccagaaagcacggaaagccaggaaagaagaaccaccagccctaccacaagatctcccatatcctgtggtgcccaccaagaagaacaaggaacgctacttcaagcgtttcttggaaatattcaaagggctggagatcactatgccattcggggaagccttacagcagatgcccctctactccaaatttatgaaggacatcctcaccaagaaggggaagtacatagacaatgagaacattgtggtagggggtaactgcaacgctataatacagaggaagctacccaagaagtttaaggatcccggaagtgttaccatcccatgcaccatagggaaggagacggtgaataaggccctcattgacttaggagcaagcatcaatctgatgcccttgtcaatgtgcaaaagaattgggaatctgaagatcgatcctaccaagatgacgcttcagctagcagaccgttcgattacacgaccttacggggtggtagaagatgtcctagtcaaggtccgccactttactttcccggtggactttgtgatcatggatatcgaagaagacgcagacattcccctcattttaggaagaccattcatgctgactgccaactgtgtggtggatatggggaatgggaacttggagctgagtattgacaaccagaagatcaccttcgacctcttcaaagcaatgaagtatccacaggaaggttggaagtgtttcagagtagaagagattgataaggaggatgtcagtattctcgagacaccacagtcttcactggagaaagcaatggttaatgctttggactgtctgaccagtgaagaagaggaagatctgaaggcttgcttggaagacttggatcgacaagacagtattccggagggagaagccaagtttgagaagctagaagagaaagttccgtccgagaagaagaaggtagagttgaagatattgccagatcacctaaagtatgtgttcttggaggaagacaagcctgtcgtaatcagcaatgcactcacaatagaagaagaaaacaggttagtaggtatcctcaagagacacagggaagctattggatgacatatatcggatctcaagggaatcagccctgcttattgcatgcacaggataatgatggaagaggattacaagccaatccggcaaccccagagaaggctaaatccgacaatgaaggaagaggtcagaaaggaggtactcaagctcttggaggcgggactcatatatcccatctctgacagtggttgggtaagcccagtacaggtggttcccaagaaaggtggaatgacagtggtgcggaatgagaagaatgacctgataccaacaaggactgtcacgggctggcgaatgtgcatcgactatcgcaagctgaatgaggccacccgaaaggaccacttccctctaccgttcatggatcagatgctggagagacttgcagggcaggcgtattattgtttcttggatggatactcaggatataatcagattgcggtggaccctagagaccaggagaagacgaccttcacatgcccttttggcgtctttgcttacagaaggatgccattcgggttatgtaatgcaccagccacatttcagaggtgcatgctggccattttttcagacatggtggagaaaagcatcgaagtgttcatggatgacttctcggttttcggatcctcattcgacagttgcttgaggaacctagagatggtacttcagaggtgcgtagagactaatctagtcctgaattgggagaagtgtcatttcatggtccgagaaggcatagtcctgggccacaagatctcagctagagggattgaagttgaccgggcaaaaatagaggttatagagaagctgccaccaccactgaatgttaaaggtgtccgaagtttcttggggcatgcagggttctacaagagattcatcaaggatttttcaaagattgttagacccctaagcaacctgctgaataaagatgtggccttcaagtttgatgaagaatgttcagcagcatttcagacactgaaagacaagcttactactgcacctgtgatgattgcacccgactggagtaaagactttgagctgatgtgcgatgccagtgattatgccataggagcagtccttggacagagacacgataaggtatttcatgctatttattatgctagcagggtcctgaatgaagcacagttgaactatgccactacagagaaggaaatgctagctgttgtctttgccttggagaagttcagatcatacttgataggatcgaaggtcaccatcttcacagatcatgctgccatcaagcacctgctcgccaagaccgattcgaagccaaggttgattagatgggtcctcttattgcaggaatttgacatcatcattaaggataagagaggatccgagaatgtggtagccgatcacttatctcggttaaagaatgaagaagtcactaaggaagagcctgaggtaagagatgaatttcctgatgagtttcttttgcaggttaccacaagaccttggtttgcggacatggcaaactacaaagccacgggagtcattccagaggagtacacttggaatcagaggaagaagttcctacacgacgcacgcttctatgtttgggatgacccccacttgttcaaagcaggggcagataatgtattgagaagatgtgtcacaaaggaagaagcacgaagcattctttggcactgtcacagttcatcatatggtggacatcatagcggggacagaacagcagcaaaagtgttacaatcaggttttttctggccctctctttttaaagatgcttacgagtttgtgcgttgttgtgatagatgccagagaacaggggggatatcacggagaaataagatgtcgttgcagaacatcatggaggtggaaatctttgactgttggggcatagacttcatgggacccctgccttcgtcatacgggaatatttacatcttggtagcagttgactatgtctccaagtgggtggaggccatagctacgccgaaggacgatgccagggttgtaatcaagtttctaaagaagaacattttctcccgcttcggagtcccacgagccttgatcagtgatgggggaacacatttctgcaacaaccagttgaagaaagtcctggagcactataatgtccgacacaaggtggccacaccttatcatcctcagacgaatggccaagcagaaatctctaacagggagctcaaacgaatccttgagaagacagttgcatcatccagaaaggattgggccttgaagctcgatgatactctctgggcctataggacagcgttcaagacccccatcggtttatcactgttccagctagtgtacgggaagtcatgccatttaccagtggaattggagcacaaagcatattgggctctccgattgcttaactttgacaaaaatgcatgcggggaaaagaggaaattgcagcttcaggagttagaagagatgagactgaatgcctatgaatcgtccagaatttacaaggaaagaacaaaggcatatcatgataagaagctgcagaggagagaattctagccaggacagcaggtattgctctttaactcaagactaaggctgtttccaggtaagctgaaatccaagtggtctgggccttttatcataaaagaagttagacctcatggagcagtggaattggtggaccctagagaagggagcttcgagaagaaatggatcgtcaacggccagcgcttaaagccgtataatggaggacaattagagcgattgacgaccattatctatttaaatgatccttgagagagcctactgtctagctaaggacaataaactaagcactggttgggaggcaacccaacatttagtgtaaaaatgtagtattttgtttctgtgtaaaaaaaaaaaaaaaaaaaaaaaaagcccaacaggtgtgagtagcaaacagggggtacgaaaatcaaaggcccacaggtacaaatagcaaaaggaggggtgccaatagcacaaatccagtgggctgcacgaagacccgcgcttagcgcgagacctcgcgctaagcgcccaggtaagtttttcaaatttgaattttaaagtctgagaggcaacgaagggacgctttacttggtgcgtttagcggccacgtgcgcgctaagcgcacacgtcataaattctggggagttttcgaaactccccaacgcctcagttgcctcccaggagcctttttaagtgcagcgcctcatttctttttcttttctttacgccttcacacttcctgcactcctcctctctgcatcttcttaccttcatcattcccttgtgctttttcacgatttttttcacgaaagcagaggtaagctggaatctggattacattgttagccttgcaggtatcggcacgctaagctcttgtgcataggcttagcggcaatggacatcatgaggaacgaaacaagaagcgcgctaagccggtgcaagacacagcagaggatacgaagcgcgcgcttagcgggctctttcgcgccaagcgcgctcatctattgggaagcacgcgctaagcgcgctcttgtggcgctaagcgcgtgacagcagcagcgcccagggtggcgccaagcgcgaggctgggccttagggccaccagtcctcatgcttttctttttacacctcccttctactttcctcaactccttcttctttgctttctgcaccgcccctctttactactttcacccctaatttgtttactttttgcacccccctaattactaactgcagtctgtttgctgtttttgtggtttttgttttttttcagatgacttctcgcaagcgccgtgccgtgcccacaccaggggaagcgtccaactgggacacttcccgctttacatctgagattgcttggcacaggtaccaagacaacattcagctccggaacatccttccggagaggaatgttgaactgggacctgggatgtttgacgagttcctccaggaactcaggaggcgcagatgggaccaggtgctgactcaccttccggagaagcggattgacgtggctctggtgaaagagttctattcgaacctttatgatccagaggaccacagtccacgattctgcagggtgcgaggacaggtcgttcgttttgatgctgacaccattaacgacttccttgacaccccggttattttggaggacggggaggagtatacagcatacaccagatacctcagcactcacccgatcctgacaccatcgcggccacactgtgcactccaggggggcgctttgtccttaatgctgatggtctcccctggaagctcctgaggaaggacatgacgacacttgctcagacatggagtgtcctttcttactatgatctcgcgcccacttctcacacttctgatgttaatcttgacagggctcgcttgatctacggtttggtgagtcgcatggacatggatgtgggcagctttatatcacagcagatcagccagattgcccagtccagcacctcgaggctcgggttcccagcgttgattacagcgttgtgtgacattcagggggtggtttctgataccctgatctttgagtcactcagccctgcgatcaacctagcctatgtgaagaagaactgctggaaccccgccgacccatcgatcactttccctgggcctcgccgcacacgtaccagagcttcagcatcagcttccgaggcccctctccctacccagtctccgtctcagccatcccagcgaccgcgacatccacctgcttccacctcagcatccatggacacgcatgggcagatgctgaggtcccttcacgtgggacagcagctcatcatggagaatatgcataggctgtccctacacctgcagatggaccccccgctcaccactccagaggcctatcgtcagcgagtcgcctggccaggagaccagccctccactgacaggggggaagagccttctggagccgctgaggatcctgctgtcgatgaggacctcattgctgacttagccactgctgactggggcccatgggcggacttgggcagaggcagttgatttttcttgatgttttccttttatgttctgatgtttcttttatgtcttgttttcttttgtgttttgtggtctgtttaggtattaaaaagaagtagtagtaataatatgagagatttagcatttgttttccgaataataattgcatgataacttgagcggtcataatttttgagcttgttctgaaaggttgaaacacttgagatgccactagtccttggaaacattggttctggaagcacgagtcaggtcaggaagtggaacatgaatagcacaaggtgggaaggatagtctgatggaacaaggtcataactggtatgccgtatacttactttaattccggtgagagtgtgaacttaattgtgagagaaaacgcctgtttttaagttcctggttttgcatcactcttggattgttagaatagttacttaaggtggatatgatcaaggccatgtttgttatatctagctacttagccaaaaagccaacccgacatcatcttttttttccccttgcacccatgattgagcctatatatcatattattccaaattgacccttgagccaataaaatgataagtcctaccctttaggatgataagagagcaaaaatgggttataaaggtcttaatttgggggattttggaaaataggtagctaagacaatggtacagtagtaagacacctcttataaactagaagcccaaaaaaaaaaaatcatgagtaaaataaagggcagaaacaaagagcaagagaggtgtcaagagaaaagcgttgtggggaataaaagggttaagaagaatgcttcggaagtattagaaatttttgctctcttaatcctaatttgaattttcaagaaaaaccatgattttttgtgagccaagccccaatacaaaccaataaagtccttagtaatccacctgaaggtaactaaagataactatacttgagaggaaatgcaaaactttggaatcttacttgcaggttgttagaaaattgcagacactaaaccatacacttgtgagcagaggaaaacaccagccttgtgaggaaagtaaggcaagccagatgtgatcaagattccaaaggactgactaaccacttgtgtgttttatgctttcattttgagatgttgacagatgcggaaaggaccactggaagaaggaggaactaaggccattgacagtgttgaaacactcagaacttgtttggaaattatttctattcttggtttgtttggggacaagcaaagtttaatttgggggattttgataactgctaaataattgtgaatttataggagttaaatagtcaaattttggcttaaaattaattatttagcagttatttgtaattaaaagtgagaaaattaatttaaattgaatttctggttgcagatacgaaaaataaggttgcatttagcaaaagtggtacagaaaggaagaaaaaagaagaaattctgaagcagacccaatccaataggggcgctaagcgcgcatcagacgctaagcgagcaactaactgcaggcgctgagcgtggtgttaagcacgaaggtggaaaccgttacgcgcgctaagcccagctaggcgcccagcgcccgatccaacagaagcacaagctcagcgtgcatggcgcgcccagcgcgcgatctgaacgcgctaagcgcgaggtgtggcgctgagcgcgactacaaaggcccataagcccacttcagcaactataaatagagaggcagtctcaaggaagcatcatcccatctcagagcatcactctcagtacttcaagcctgagttttcttccctctctacattctttgttttgttagcctaacttttctttcattcccagttgtaagccctcaatggccatgagtggctaaacccctagctagggcctggcaggcctaaaaagccaacgatgtacaatgagcttcaagagttatcaatgcaaaggaatttattccaggtttttctgttctatttcttttcttttattcttgcattcattcttagatctctttttgggttttaatcgctcgggagagggtaattctcaataatatttaagatccaatgcatgcatcagttttaggggttatacgcttgggaaagggtaacacctaatagaacatctaaagaaaagaatcattgggttggcattgctaggcatagaatgataactcactgcccatgcatctaagcaacatctagaacttaatcttaacgcattttaattattgaatcttcgcaaaggcatttgggagataggtagttaaaataggcttgccaacgtgaggcatcaggggcaagtagtcaacagatgtgggtagaattaacactatttcattggtaatgaatatcatacttacatgcatcgtaggccaattgggtttgtctggtcttggcatttctatcaattgttttcccttttacttatttgttttagtaatagcactctttactattcctactttcatttctactttactactttactcccacttacaaattgagaggtattggaaaagtgcaataaaatccctgcggacacgacactcggacttccgagctttactacttgtcacgatttggtgcacttgccaaagtcttaatagcagacttgacgaggaacaaatttagagataaaaacggagttgcaaaaatattgcagtatttgtctcatattctttagtcgtcgcaaacagggataatgaacaacaaaaggtctatcttgttgaatcctcttctagtgtcacgtgactctttaataaaataaatctaagcctttaaatttgagaaaaataaagaattcaaattgagagtaacattttaaagttactcctttcctatatatatatatatatatatatatatatatatatatatatatatatatatatatatatatatatatccactatatgctctatgatttctacctaatattttgcgaggatttccaatatataaataactattatgcatccattcatcaaaacagaaagtactaacgggaacatgatataatattttgtgcttgaaaatgcaaatatatatgacccactccattatgagtccccaaaagattggatatatgataccatgctccttgataaggccaggaagaaacgccggagttcagttttgtattctattttttgaatcatttcatttgaggcatgaggggccattatatatatatatatatatatatatatatatatatataatgcaatagcacattatcccatgcccctatgtatgtttccttttcattattttgttttctacgtgtgatttgattttattgtatattctagtttcgattcgtcatgtctactatcatcgttgtctcgtctgcttctgtgaagtgaaagaaaaaataaagatagtaattaaagatagatggcgaataatatgtatgtatttgtttcagtttacttaaaaaaaaattgttttttgactaacatttttagaaaacttttaaaaattaaactgaccattatttcttaaaaaacatttatctccaaatatgcactaaattactggtttcgaaatcatatataaaaactactaaaacgcttggtaaacttttattttacatctgcaaaaaaaaataaaattattctacactttatttgaaataaaagggaaaaaaattggagagtaaaaaaataaaaataaggtggaatgtattatttaaataggtaaaaatagaatgaaaaattgaagaaaattttatttattaatttgaaaaagtaaaaaagaaagtggagtaaataaataaattatggaaaaatatattttattattaatagttataaatttaattaaataaaaattaaaccttttactataatattttttcatataaaataaaaaaattgtttaattttttaatatttttatggtatacaaaaattatttaacattgaaagtaactaaaaaaaaaaaacccacattcttttcctcccgctagtaaggttttcttggtctgccacactcattctttctcctcccctctctcttcgtcccaaccaaataaggaaaataattacattattgttcctccttccccaacttccctttttaccacccaaataaagtgttagtccttaaagttgtaagcatcttttatttgaaatatctaattataaacaaaaacttttacttataaatattgtaaaatatttttttatttattttggtccatttttattaatttaattttcttgatgctatgatttaaagtaaattatattttacgaagtcgaaaactaaaatagaaaattcgtaaaattaataactaaaataattggcacttgtaatttcaacaataacttaaaagtttattcattaaaaactcacatagggaaagtaggaatacgagatatgttattttaattagtaccaaagtccatctatttgatctttgaaggagttggattggtttaaggtaaatgtgggagacaacgcactaacagaattaggttagataagtgcacgtttcaatgtatatacactatatttgtttatggatagccaagaacatataaaagaactttgcatgaatggcgacattcttacatcagctttacatattaatcattttttttgtcatttttgtccttttggttgtgttaattgtactttttatgctttattattaacttttctttttaatattcgatttatttcttattctaagcaatatgctttttgctgacaaatgaagcattcttgggggcgatatatgatcaaatataacgtacgtacataataaagtcacgtacgttttttttaattaagttcacaaaacaaaaccatgaactgcacatagttatctatgttatttaaaatgggatcggaataatgcttaagccgtagtgcatgtcttatgcatgataacaggagatgcttactatatatatatatatcctacgaaattttgagcaggatcatatgcatatggttataatcaagtaacgtggtttaactaccgtggctccaggtttttcaaatattcaagcagggctgaaaatttaaagttgaaattttataattcggaaaagtaattaaggcactgttgacatgtattaaagtgggaggaggagagataatgtagtttaattgtttactaacacattacaacaagaagaagacagggaagtgaatccttctcaacaacttaacaacttaaatgcgtgattaaattgaaaagagtggggcctagctaatcgattgtttggtgagcttgattgagattaaattgagaaggggacaaactgaaagaagaaatgaatgctcttgtttttatattattttttttaagtgcaaaaaataaatattattgaagtaataaggatataccaatcgatcccactatgcatcagacctgtcgatgattggttacatgaagagcatacaatacaaaaactaaacagggacataaataacaagtgtttaatatgtgaatttgacagctattcttttgatttggaatacaagtgtgaagaaaagtctcatatagagtagaagggaaaaagttaaatatcatttaagtgattaaaaaattcttaaacccaaattttaaaattttgaattaaaatgtgatatcaaatttcccttagctcattgatataaatcttccccaccttaaaattattgatgcatgcagtggttgttagatagttattaattagctttatgttatataatctcatttcaaatgatttttttctaattgattgtttgacaaataatgacaatttatatagacaagaggaataggatcattcgaaacatatcctctccagtcatgttccttctacaacaaaaaaatcaaaggtaatgaaagatagagaatgaagaaatgaagacagattatgaagaaataaataataataaaaaagttagagaaagatagatgagatagataggtgttggagaaaatccaaatccaaatccagaatattaacggggcagtcgcatgcatggaaaagacaaaaagtctatattgaacaatcaaggcaaatgttttatgcacaattataataggtgttgcatgatatatagtaattttcttttatatttaacttattttaaaattcaacaaaatcaattataaaagttaaaagaaaaaacagtgtactttgattctagcaagaaggtggaaaaattgtagcgcataagaaattagactaaacatacagcacattatataatattgatagtgataaataatattgagaatgtgtttagatgaataaattaaaatgagtaaagtaattatctagaggatttaaaattcctcccacctaaataatgtgtttggatgctcatttagaagaaattttaaattttgacattttaaaatggaatttgtttttaactataaacttagaattttaaattctttcaaaaataaaggaattctaaaattttcagcagctttcacagaaggcctctgcggggccatgtctgtgatcaggggaggaggtgaggtggtcgacaatgacaattcaggccttgacgtgggggaggtagctggagcggagcatgaagcgaaggaaggaggcagcgtagagcgtgtggttgaccatggtgacggagacagcgaggaggacgaggcacttggcgttgaagcagtgaagctggccttcattgcggaggcacatgatgatggactgggcgcgcgtgagagaagagagtgtattatggtaagagagctgaaagaccaagcgactgaggcaggtggagttaaggaggtgcgtggagtgggagtaggtgagccaagcttcttcagttttgcggtcgtgaaggagggagaaaagcttgtaatcgtaggttccgaggaggttgtggcggtggcgcgttggatgggagagagtgggggttgtaagagagtgatattcatgatggttgttcctccatttgggataagtttatttaactatctaccaagtcatcttgttatccaaacaagaaattttaacaatgaaagaattttaattaaagcaattaaattttttaaaatttaaaattctctaaatttccaaaatctctcatccaaacacactgtgatagtattcttaatttaaaaaattattattcaatcacaaagtcaaactgtgatattgaataaatttactgactttttatattgagagtacatatcaactaaattctttacttagcatgaaaggattttgtgcatgttttaaaagtaaaaaatctttatgtacagtattaaatataaaattatatgctaaaaaaatctttatgaaaagaaaaacgatataggaaagttgatgtcacctagaaaagatttgggttttcattttttattttgggtttgggttaaagcacttaaaaaacgagtggttgatgctaggtgcacccaacattattgctggtgcacctagcatattatgttaagggacaaaaatacccctgggtatttttttaaaacaaaagtgcaccagcgcccaccccccaatttctcttcttctctcacgcgactgtgcacctagagcctccctatttctcttctctcacgcgactattcttcttcacctcttctctcacgtgacagtgcttcttcttgcaccgctgccttcttcttcatcccatgcgcccccgtttgtccctacattgtgctttggagctttgctttgatggcattgaggacgtgcattgggctttgctccaccgtcgaccgttgagctaagccttttctccccatggtttctgtttttgcttcttttttggtttgtaatgtgtttaagttgatccacatagggatttagttgatccgcattagaggtaggtgatagggttatgcatacggatcaagtaggaggtagacgatcagtaatagtatgtagccttacagatgaaataagcagcatacggatcaagttgacccgtacgagtcttacaaatcaagttgatccgtaagagtcatacggatgaagttgatccgtatgacttttacggatcaacttgatctgtatgagcctgacggaccaagttgatccgtaacactcgtatggatcaagttgatccgtaagagtcatacagatcaacttgatctgtaagactcgtacggatcaacatcatccgtatgactctattttaatttttaaaaaaaaatgcaaaataggttataatttatgaaaaatggtttttattagggtttagggttagttttgagacttttagggtgaagtaaagtacgattgaataatgaaataagtttcaaattatgctttcagcaaccaatgtttacaccactgcagcaatgctctcagcctcgacaaactccttctccatctccttgacagctctaatcaaacccttcgtcatgctcttgacacgcaaaccactccctttcactttgtcctatagcttttctgccattccctaatccaaagcctccaactagagagactgtattaacttgtcataatcatcaacgcttggacgacaccataatcttccatctcccaccatttgaataagcgctagcaagaacaatgtaagtgtacacatctggtctgaagctcgtactttccctcaacctcatcatcgccacagctttccccatttccccagcctttgaattcgtcgtaacaagataattgtaaagtaataagtgtcgggatgaggcacacagtgaaaagcctcaaaattatcaaacacctacaaggcaaccttccttttccgcaacctggagaaggaactactgaactgatttagaatcctggcattgaggagtccactatccttcttctctccaatatccttaacgaactcccacaacgagtacacactatacatgttaatgagcacctgaaaatgaaattaatttttgaagggtataagttgttgaattgtgttttgtttgaaaaaggtaatattgtgatgaatttgtgtagtttagtgatggaatttgtggtaaacatttgcaaatcatggttagaactagaggcttaggttgtgctttaggtagggttataggcagagccctaaagagaaaacactgcacacctatctttttaatgaaaaagataaacgagagacatttttgatattttttaaaaatactgggtgcaccagcagtaagtctggtgcacctagcatcagcccaaacgagtgtgtggtgtgggtaagacaatgggtttgtagcccgtgaggacccaaaatgagaatgacgggttatgcgttcacgagccattcatcccaagtttgaattcaaaaaggcgcatttgatttttgttctgtttagtagaagcgaccccatcaagtgtttgtgaaaatgccagccagaaacttctccgtccacaccccacgaaggtcacccaggttcctcccccaacaaaaccacgacactcccaaccccaaatctgcgaaactcagcgtttctgccaacaaatcggagaagtgcgctgttgggtcgagaagatctccgaggctgaacaacgttgaagaacaatctccccctctgagacgatctcccatgttgaacaacgagccagtcggtaaacaattgaaaggcactagagtgaagaagggtggtgtaactgcaacgaaggaaaatcgtgtcgtttcggacgagggttttggtggaggaagaaagaaggagagaaacaggaagagggttgaagtggaaacgcaagaaagtgtcgtttcggacgaggggtttggtggaggaataaagaaggagagaaacaggaagagggttgaagttggaacgcaagaaaacggtgtcgtttcggacgaggggtttggaggaggaagaaagaaggagagaaactggaagagggttaaagtcaaaacaaaagaaaatcgtgtcgttttggatgaggggattggtggaggagcaaagaaggaggaaaatgggaagagggtgaaaacgaaagcaaatcgtgtcgtttcggatgagggttttggtggaggaagaaagaagggggaaaatggggagaagagaaagcgtggtggcgaagaaattagtaaagggtggacgaaggaacaggaattggctcttcaaagagcgtattttgctgcaaagcctagcccccatttctggaagaacgtctccaaactggtatacatcatcctctctgtgtctgagtagaaaatgttgactttagctgggaactaagtttgagaataatgtagttgtaatttaactgaaatttgcgagtttgggattggattgtgcaaatattcgaagatgtctgttaagtggtttacatttacgagtttgatatggttgagtatcactgaaatttaacttgattgtcttctttctgccttgattttgttgtcacctcagatgttggaaaacagatttgatactcttgcatgttatttgatagctaaggattgcggtgaataagtgattaattgattttataagccaaaagtgtatctctgaaatgtcgctagctgattgtatttgaatgaagtgacgtagaagtagaatggaatgctactaggtttcattttttgtatggtatacaattaggatggcataggtggtttccagctaaaaatattcagaacaatggcatggtaactttattccattccatcccatttcatttaattccaatcatttatcaagcatggaggaattgttatagaaagttttagttttctgtatgtatatatttcttaaagaacaaatgcagttttatagtctgttggcagtcaattgcttgtcagatacatgcggatgggactagcttatagatatgttttatccttgtattggttgaatcattgtcattcaaaatctgttgcaggtgccaggaaagtctcaacaagattgctttgatagaattcactgtgactatatgacaccacctcaaactcagcctcattcgagggcaaagacattgaagtcatcacccattcaccaattttctatatctgcaagtaaacttctcaaacctattgataaaacagttagaaaatccaatgttctaaaaccaaagaacatcattacccagaagtccattgagaagctgttacagcaccatcttaaagttgatctagatcgtgaagtggacatattttctgttcttgaaccaaacactgatttttctactaatgctctacagcctagtgaagcactttctactccaaagcagcaaaaggaaaacaaagggttcctgcaaaattgcactgaaacatcatcttcaagccataagaagccactttcaagatttagtggctcgtgcgttacagaacttgttagtcccccagtactaaagaaagtaaagaacagggtaatgcatgagaaatatatcaatcaattgcgctgtagagaatctaggagaagagcagccgctacgaaaataattggtgaaggaaccagcattcagaaaagggatgtagttaaaggagcaaaagttgccttggtttctgaagctagagatgctatcaataagtttcaacagtctcaagtcaatttgatggacaatacttgtagttctgatgaagataacggtgatggcgttgaatttgaagatgaaagtcaataggtttttctcatgctgttttagtgaaacttgttgactaatttcatgtatagtagtgtatgacttgtagatttagaaaccgtagtccctactccctagccttgtaaacaactatttttatttttttttaaatcaggttttgttgtatttttctgtagtttttttaaaaaaaagcaattcagctttcatactttcattatattctggcattgatttttgcttcaaatccaatccagacgacaaatctggatattggcctaaaacattcctctctttcccgctcaggaacttttgtattttttgggtagatggatttgagctactggggctgacttgggttattattctttttattgttgccctgttagaatttttattgacttgacattgcagtgcctttacatgtactttaccccgccaaattaatttgcaacataggaattgagttcaattgtttgtgagatctcaactcgtacaacaccaagatgtatacatttagatttagattggtcgctttagaaacctttgaacatgttccaaaatttatgggctggtctacgcattcttaaggatattgctattggcactctacagatcattattcaaacccccatccttttagaaatttcctttttattttggcaactttacaacttgtggactgtaaatagcattggtgcaacttctcagttctgcgttccgttgaggccttcatgtttttaaatgaatccacttgactcctgacccgtcgtttaaaaacttgtgtctgatccttgtttttaatgcaataaaatacatatttgtctcatcttgtatcagcaacaaatacaaactaatgtagaaactaaaaaatagccggagggcccatttcaattggtgattttttactattatttatgcacaatacttattaaagtctcataacttatggagtttttgataaaaaaatatgttttttggcagacaaaaataattgatgagttactaattaatttttaaaattaattaataaatataaaatgatataaaataatattttatatggattttattttacagataaaaaatatttttaagtaattctaattttttgtttttaattgattttgaagccttactactttttttatttgaaagtaaaatattttatcaaaaattagaatataaaaatatcataacaattaaaataaacagtatagtattaaaggataaggtatatgataaatttaattaaagtagtaaggataaaattgatttttttttataatttacaagttcaaacagtaatgtatatatgaaagattttttttttcgctgaaaatatacgaaagaatgttataattaagtttgtgatatgaagtatgaacttattaagttggtcaaacaaacttatagatcaagaaaattttggaattttgcggtttgcacaaaacatgatttttttttttggtcgtctacataacatgatttctatgttcttagttgtagtattggatttgagataacacagtctctttgcagtgacgtgttggatcatttagaaagtaaaaaaagctgaagtttttaacgacatcagatgggacaaatggtgtacattcactagatttgtttcttaaagcctttgagtcgtggaacaatatataggcgaacgaaaagagaagttatttggcatccacgagcaaaaaattccttcaagattaatgtcgatgacaattccactcggaatccttgaaggtccaactttggaggtttagtcaagctatactaagaatgacttatcaacgtttttggtttttatagtataacaacaaatttaaatgttgaactcttaactatttctcacgacttaagttagtttggaatgcaggatgtagagatgttgtgtgtgaatctgatttcaaaacatctttttatcttatgaagttcatcatcttcgaccttaagctcccttagtcaatctcattaggggaaagtttcatgtcttacccttagaacttgaattttcaccatacctcccataataagagaacatatatgtgaagatataatgtctgttagatgattaatggagaaggaaagacaaaaaagatcacgaatttgattttgtctttgattctatctgctaacaaaaattaacattctaacaaattaatatttatcaattaaaaaaaagaaatatacatgtaaattggttgtcataatacataacatcttctaattatctatgaagcaccgacactgatatggacaccggacacgacacggacacgaacacgtgaacacctgtcaaacacatcaaattcaacccggacacgggcgtcggtatcgtgtcagtgttgatgttagtgtcgtgtcggacaccggacacggcaagggactggggtgtccgtgcttcatagctaattatacgtttgttacatattattattaaaaaaatttaacggaaaagatatatattaatgaaagcaagatagaagtcacaagctatagcaactaccaagccaaagaaatattattaagttaaaagtaagcggaaccaagccgcttggctacataaaaagccatagacacagtcattttctcaataaacaaatcccaacacaagttacagtattcacattatttggcagatcccatatatccatgtgtgcaagatccctactactcgttccctgtgacaccaccatgcgctcgtgacagatctgtggttgtaaggtttccattttgtaatcttgccacttatgaatttaccccatctacagtaaacaattcatcaggtttaatttcgaaacataaagacaatagttgaatcccttcactttggccttacaccaacaccacaaaaaaatattgcatctcctctaccactgcctccatatcccgatttgcctctttaaatataattatgtttcggttcttccaaattgcccagactatattcatccatactgtccaccaagccaactttgcctttttccctcttaaattcccttcatgttgcaggaagtgtccttgagtaccctttggctgtgtcctcatcttgccaccccaccagtagcatctatcccaaacctcattagcaaacttgcagttaaaaaataaatgttttgcaatttgcaactcagagttacattgaacacagtttgtctcactttttggttgaattttgttatgcttttggagattgtctttggttgatattctattatgttttactttccacaccaatcctttgacattgtaaggaacatccaatttctagatcttcctgaaaaaaccagcatcctccagacttccttcctcatgtaacaactcatatacctcctttacaacatattctttttgcttaccactcctccactcccaaccatcacccttgttgagaataggtgatcttccttgtaggtcttccatcaattgttgtattagttcactttcccattgaaacctccctttcctccaactcagattccaatcccaaacaccccatgccatccccacacctccaacaccgtattctctttttgttccgataaagaaaaaacccgatgatactaagtaaaaaacctctctagtcctaaccacttccccaaccctccattctcaataggggaacacactgcatcccatttgacccatgataagaaattcctttgaatcctatttaaaatagtaaccagtttccttggaattttgaagaaagataaaaagtataaaggtatagatgacaaaaccgatttgatgaggcaaactctccttccaaatgacaaatgttttcttcaccaagttgccaacctctttttgcatcttgtttatgatcatttgctatgttgaaatattccttacttccaccttaatcgaaaattcccaagtaaataaaaggaatgatcatagtggtgcaattcaaaagacttgcacaatttaagacctccttatcctccacatgaatgccaaccaagctactcttgtgaaaattcaccttcaaactggaggctatctcaaagcatcatagaattgttttcaaagtaatgaagtcttttacatcatttttaaagaagaatatggcatcatccgaaaattgaagaagaggtatcttcaaatttctattctcaacttggactccctgaaagcaaattctttgcctttgcctctctaaccaaccccgctaaaccctcctgccaccatcaagaagagaaaaggcacccagggatcaccttgtctaaaacctttcttaggaaaaaattcctttgttggacttccatttacaagaacaaatatcgatgatgactgtaagcaaccccagatccatttagtgcaaaagaccaacctatataacatgtaggttaagaaatctcatctcaccaaatagtacaccttctcaaaatcggctttgaatataaaacattacttctttttggttttagcttcatgaaccacctcattagctatcaaaacatcatccaaaatatttcttccactaatgaaggtcaattgtctagagtctatcacattcataaaactttgctaattcttttagccaatttttttgcaatgatcttgtatagacttccaataagtgagataggcctatactctcccaagtcttgcagatcatgcttctttgggataagtgccaagaaagatgcattcacacctttaggccacctcccaaacctatgatattcttgaatagctattataatgtcctctttgaccacttcccaacaagctttgatgaaattaaaattaagtccatccgagccaaaaatcttgttgtcatcacactcccacacgacacatttgatatctcttctgaaaaattggccacaagagaaatattatcttcctttgagatagatttaaatctcactccttccaactccacctctaaatctctcttcttttttaaccttcaccgattcttcactccaaatgtgttccatcttgataccttttataccattggatcttcttctccaattaaccatcccatggaaaaagcttgcatttgcatccccttctctaagccattttattatagactattgccacaaggcagattcttgaattctttatgacctccaaaaatcctttaatatctcttctctttcatttacctcgtccacactaagccccccaaagttcctctttagcatttaacaaattgatgtcacacaccaaagcctcgacaatagcttgatgaccaccaaacttctccacactccactttttgatatcttttttgagaagcttgaacttttctttgaccacaaaaactccacacccttggacattgcattattcatatttttttttcttcacaaaatccacaaaccatggctcttcaatccaataattacatatcttaaatggcctaggtccccaatcaatattgtaatgtttgacaataacgaggcaacaattagaaattgatctatctaacacgtattgtgtagagtttggcattcttgtaaccattccaatgagactaaggccttatccaacctattcatggctcctcctcccgcccttatccaagaaaaccttctccctaccaatggtaactcaattacctccatgttgtcaataaaggcattgaactctacaagcttacaagatctttgttggcatccccctcctcttctcttcctttcctccctccttctaatggcattgaaatcaccaataataagtgatttgctcgagattgtttccactccacatgatcatccccccacaacgctctacacatcttttcatctacatttaccatttttgtttcttgtatgcacacaaaacttggttcctctttcacaatgagctttttaattgccttccacttcactcgactccccaaactcctcatgttatatgacactatcttcatggacaacttttggcttccttctcccctttttctcctttgattactttcccattgtatcttgtttcaaacccaataagtttttgatccacttcatgcttctttcttttgaatttcacaccaaggctacatgcaatctccttattttactcgcttctacagagtaatctttcaacaaatttgcatttggaattttaactctattcataggataacaaatttcagataagactttgttttctttgttgatgctgatcccaatttcgatactttcttcctattagactgtaattcacaaagtaatatttccttcttattggttgggttgaacgccaacaattttttcctccccttctaccagttgtgatctttgcctctatagaaatatttcggtttctccctggtggactgctcccactgcgtacctacaccctgctggttaaatgaatgaattatctgtatatcggcctcatcctgattagtatccatattcaacattaagaggttattgttgggcttagcccctcaataacaaaacctttttccttaataataataaagtgtagtgagtctaattagattcacataataacttatcttttatttctgaactctgactgatcaagagatattaattaaactaacggaaataaagtgttaaatcgattaaataaaataaaacaacataaatagagtaaaaatgaagctacacgtacgcatagtgttagggaaatgactaataattagagattggtgaaagaagatccaaatgtaatatacctgtataggcttctaaacaaatacagtacagtatcacaatttgtgctactttagttttatacttcacttcattaagaacagagatattatgttgttattgcacttttcacttctattgatgtagtgtatcttttatctagtctaacttttaaattataatttattcgttctttcagtatgcttaatttagtttattttaaaaataatcatatacttttatcagtttcataagaaagtcttaaaaaaagtgattatttgtctaataatattttaatcgacttttgcctcatccagcgtcagtagtccaatggttagaataattgccttccaagcaatagacccggtttggaatgagtcttgacatatccatatgatttgtttacagagagttgtttcttcattaaggatcaaattctatgacatgtatttattataaaccagctaacagaaaagaaaaaaaacttaagttaatgaataaataacatataagatttcgtactttacaattacatgtgacagaaatactgtcttgttatgaattaaattttttactagttggaatctgtgtgaccgtatccttatccattgcatgtcttttaccttgtccatatttgtaactccatatttttaatatccaattttatattagctttgtttagttgttttgaactgcaacaagtattgaagtctgtacaaaaacggtttagtgttcaatgttatttttgaaactatccttgtttgtattttggtaacaagttgccaagtaggctatgtgaaaaaggaatatgtttggtcctactaattttaagatccttttttatgttatttgatcgttgaaggtgaagaaaatagatggtttttctgccaggaacattaacataatgttgaattttattactttctctctctctcgaatagaagtaataaacatctcttattttttttctcaaatataaataaatctcaactaaagaaatcttatttaatgaaattattcttaaaatatcttttatttaataaaatcaaatacttttttatatttaatatcaaattctaaaaaggagtaatttaagaaaaaagttgttttttaattagaaatgacacaatttaatgaaactaactaattttttttaataaatgtaaaaatgtcttttttttttctcatagttgagataggaggaaatatcttctaaaagttaactccttttatctgtcaagtgtgctgaaaatagatgatttgatgggattttttccaagttgcaacattcaaacttcaaacatgggatatcttatattgagtgatacctaataagaaaaatggattgtaatgtaaccaaaagaagagaagcaaataaaacatgaaaggcaagcctaaatttctcttcatcagtcaagccttttatagctaacattagatggttctatagtttgtgttgacattagactgatagtcacagtgctttgatttatagtcaacatagcattagtgtaattacaaaaaatgaagttagccatatttcttgtcacgccactgttatctgttttcaccggcttttttttttaactcaattactttgtgccgttcatctggcaaccaatagaactaaacaactgaactataccttatgtgatttgttattgagtattttttttttggcgtaccatgatgagcagtttttacatgttacaaatcctagctcatcattgtagttgtacttgtgagatctgtaatttctgcagtcatcttgggttagcagtaagtttagcactttaaaaagcaccgccaagctgaaactttccctaactagaagtaaagaggatcctattcatttcaatagtaataatttctaataacaaggagctgatgtatacaacttgatatactatttggtccatcgaatggagggggctaccacgtcctaaaattattgagaaatcataaagcaacttgccgattataaataattttataagtggttgttatacaattcacttacttctcataaagtgttagatatctgacaaagaagaacccttttaaaattgtgtcatccacttgttgtgtgaccacgcacgccatcaggatacaggttacacataattatttgtttaataatgtcccagaaaagaaattttttgaagcaaccgcttattcaggaatctattaaaatcaggttgattccgcttatgggtttggtaacaacccttcttcattactaaaaaaatggatgtttatcacaatgggaaagtgaggcttgaactgaacataccccatagtatgttaaaatacagggtaaagttgtaacttacataagaatcaaagcatcattcaaagccaacttattgggaaatctcattaaactaacacccctaattccttgaattacacaagaggaaaactttgcttgtttttcaacatcagcaaattgttatttcagctttccatctttctcctagagacatctaccaccataacctgcatttctgaatagtgcttgctttatctcttcctggttcatacaatttctctgctctgctgcctaagaccacgaaaacaataagttataagaagtaaataacatgtttgatttcaagcctgtaaacaaatattgaggccactaaaatatgttacaattacaaacccctgagcaagatgcttgcattgaaaaatcattgaagctgcttataacacactggtgaatctcaaggcctaatgcttctaaggtgttcactgtggacagtagtaatcctggctttgtggcacagcagatgctaatccttgtgtcctggtctcttctctcaacatcaaactgcaaaaacattacaacacatacatacatttgttcaggaacttggcctgtgattatggatcagtttaggggtttgactgactggttagaactaagcataccttgggggaatttctaaccattacttcattgggctttagttccttagaaatgcctaagaggtttatctgatttgttccctcctctatttcttcttcttgcaacttacctatcctttctagaagctctttcatgtaatcaattgtgtctccaagaatggaggtcctgtccatctgtcaaagtttgtattctcatgttagttcaaattaaggttatagaacaaatcaaacaacaaatgcaagtgttagtaaaaaaaaaataacaatcatgaaaagacaacctacttgagaaatccaatttcatttccattggttgagacattcataaaaaggaattgacaaggtaagaatgaggtaaaaaaagaaaaaataaaaacataatactatatattttgaatcaccttgctaatctttgggactattgaccttagcatggaaagacggtcattcaaacgctttcttctccttctttctgccatgagattctttgagggctgcccttctagtttctttgatttgggttttttctccccacacaagcccatgttgaagactggaatctctgtcacttgttcctcaattttgcagccaatttttgcttgttccaagctctggttatcccttcccagaaagccaaactcttcatcctccaatgatgggttatcctcttgtggcaaaagtggtgctgactcatcattcctggtgtatgaagaatcaagctcaggcaatgtgaagccatcaacaaaagggtatgctgcttcacttccataagggcattcaaatctgtggtctagtggagtggaaaatgcagcaaatgagggattcaaagtagctaaaccttggttctcatcaaaagagtcaaagctccaaccactagggagtagtaactcattcaacccagttgacaaagcattactccaagtagtgtcttttcttggagcaagtagctcatccagaaaaccaagttgagaaagctccatccttgtgctgtttctctctctcacgctctttctctttctctttctctattcctcttccctaactctctggaaaagaagtgaattgtgaaaaaagcaaacagggaaggctttgataagatgaagttgaagcaagtggggggagtttgtttaaataatagtagtgtaatactaatagcacctatgattacagaatgtattacagtgaaaagtctagtgaaatagcacctagaggtagcctcggattaaaatggaatctctttctctttctttctttctcttttctctctcgctctcaaggtgaattaatgtccttttcaccgaaataatcacccagacagaatttgtatttaatttaccattccttgaaaactttgacccacaattctgtctttaacgaaaatgggtggaattagcatcataggttgtcagtacttcttccatttttaatgtaaccccctctctctctttcacgttcaaagagaaaataatgcatctctccttcccatcatggttttagagtttagactccaccctatacacaatagtcaataattttcattattctatacaatataaaaaaaaagtaaaaaatatatatttatctatgctctacttaggaaataggattgtgacaatttggaacattgttcatttttcattaaccaccattccatgccgtttttttttaaatttctccatgttaatcagtttccttccatgccagcctgttttatcttcaattatggacaagtgtctataattaacaaggggctatattaaaagtgggccaagtattagcattagcatgcaaatacattttaaggaatgaaatttgttgatttgaggcccctttttttgttttgttttgttttcatatctttcaatactttatgtatctttaacctggaaaagactaatgaaaaacagtttgtcttttcttttgctacatttagtggtttctttagtcagttaatttttttcagtaactagattaagtatatgtatccccaccgggtataaatttttaaaaaaaatacatggttccaatcattaattcattcttctatcattgcaccgtaaaagcttatatcaggttcagctgataaaatttcaagggtggtacggaaaatctggcctttgaacggtgtaggtccagtgtatactagtttacaaggctcagaaatttcatcttgaaaaattaatcttgaattaccaacaattttcacccactcccgaggcagagatgaagtgtgtgatcacgttggtagaactacaacaagtactgctacactctactaggcgacaatttatacatacaataagcatgtatgggtctggattttgtgaaatcatcatacagttcagtgtgagaacatggtaatgagcaaaaccatgttcccaaaatgatgagctttttatttatagtaataaattattcatctgtccttcccttgtaatagtaataataagtaataaacccagtaatgtgccaaaatattaaacagtgagtgatcgcgtgaccaaattgctttctcaattagatgataattaaattaacttgttaactaattactactttgcacgttcatacccacattaggtgaccaaattgcatcctgaattaaatgacacctatagcccaattagccaataagcaaattacactttcatatttcactaatactacgtacatcttaatttattttgggtccaggctacttgaactatgtaggttgtcatataaagttaaaattgctcatctgtcaatatcagctaggatgcaccagaattgtgactaggcccccccactgattgtttattgcgtaaatgcaatggcaattttttattttttatttttgtgcatttagttggctgttagaaaacaatagtggaagaagaacaaggagaatagctgatgaacattaattgatgagcatttaatgtgcacagtgaccacgcagcccagagtttgcatgcttgactgaaaggcattcatcagttctgaatgtctggtatcacattatggactcgtctctcttaacactctgaattggtttatgagcacattattgtaaaggttctttttcattgaaagatgtgaagtctatatatgcttatgcttatctcatttgtaataattgaggtttattctttctgttataacgaatgcattattgtattgttgaagttgaaattttaaaaaaataaaaataactaaactaatactataaattatccaaactcttgagattttcactttagattttttgttataaagtttagatgatggtttacaatttatactcattgattacgtacgccaagtgaatctgttaaaacaattatgtgtaataccgaaggacaaggccaagagttgtgttttggatttaatttgggaaagatgtacctctaattcaatttctgtgtgcgttgcctatgcttatggnnnnnnnnnnnnnnnnnnnnnnnnnnnnnnnnnnnnnnnnnnnnnnnnnnnnnnnnnnnnnnnnnnnnnnnnnnnnnnnnnnnnnnnnnnnnnnnnnnnnnnnnnnnnnnnnnnnnnnnnnnnnnnnnnnnnnnnnnnnnnnnnnnnnnnnnnnnnnnnnnnnnnnnnnnnnnnnnnnnnnnnnnnnnnnnnnnnnnnnnnnnnnnnnnnnnnnnnnnnnnnnnnnnnnnnnnnnnnnnnnnnnnnnnnnnnnnnnnnnnnnnnnnnnnnnnnnnnnnnnnnnnnnnnnnnnnnnnnnnnnnnnnnnnnnnnnnnnnnnnnnnnnnnnnnnnnnnnnnnnnnnnnnnnnnnnnnnnnnnnnnnnnnnnnnnnnnnnnnnnnnnnnnnnnnnnnnnnnnnnnnnnnnnnnnnnnnnnnnnnnnnnnnnnnnnnnnnnnnnnnnnnnnnnnnnnnnnnnnnnnnnnnnnnnnnnnnnnnnnnnnnnnnnnnnnnnnnnnnnnnnnnnnnnnnnnnnnnnnnnnnnnnnnnnnnnnnnnnnnnnnnnnnnnnnnnnnnnnnnnnnnnnnnnnnnnnnnnnnnnnnnnnnnnnnnnnnnnnnnnnnnnnnnnnnnnnnnnnnnnnnnnnnnnnnnnnnnnnnnnnnnnnnnnnnnnnnnnnnnnnnnnnnnnnnnnnnnnnnnnnnnnnnnnnnnnnnnnnnnnnnnnnnnnnnnnnnnnnnnnnnnnnnnnnnnnnnnnnnnnnnnnnnnnnnnnnnnnnnnnnnnnnnnnnnnnnnnnnnnnnnnnnnnnnnnnnnnnnnnnnnnnnnnnnnnnnnnnnnnnnnnnnnnnnnnnnnnnnnnnnnnnnnnnnnnnnnnnnnnnnnnnnnnnnnnnnnnnnnnnnnnnnnnnnnnnnnnnnnnnnnnnnnnnnnnnnnnnnnnnnnnnnnnnnnnnnnnnnnnnnnnnnnnnnnnnnnnnnnnnnnnnnnnnnnnnnnnnnnnnnnnnnnnnnnnnnnnnnnnnnnnnnnnnnnnnnnnnnnnnnnnnnnnnnnnnnnnnnnnnnnnnnnnnnnnnnnnnnnnnnnnnnnnnnnnnnnnnnnnnnnnnnnnnnnnnnnnnnnnnnnnnnnnnnnnnnnnnnnnnnnnnnnnnnnnnnnnnnnnnnnnnnnnnnnnnnnnnnnnnnnnnnnnnnnnnnnnnnnnnnnnnnnnnnnnnnnnnnnnnnnnnnnnnnnnnnnnnnnnnnnnnnnnnnnnnnnnnnnnnnnnnnnnnnnnnnnnnnnnnnnnnnnnnnnnnnnnnnnnnnnnnnnnnnnnnnnnnnnnnnnnnnnnnnnnnnnnnnnnnnnnnnnnnnnnnnnnnnnnnnnnnnnnnnnnnnnnnnnnnnnnnnnnnnnnnnnnnnnnnnnnnnnnnnnnnnnnnnnnnnnnnnnnnnnnnnnnnnnnnnnnnnnnnnnnnnnnnnnnnnnnnnnnnnnnnnnnnnnnnnnnnnnnnnnnnnnnnnnnnnnnnnnnnnnnnnnnnnnnnnnnnnnnnnnnnnnnnnnnnnnnnnnnnnnnnnnnnnnnnnnnnnnnnnnnnnnnnnnnnnnnnnnnnnnnnnnnnnnnnnnnnnnnnnnnnnnnnnnnnnnnnnnnnnnnnnnnnnnnnnnnnnnnnnnnnnnnnnnnnnnnnnnnnnnnnnnnnnnnnnnnnnnnnnnnnnnnnnnnnnnnnnnnnnnnnnnnnnnnnnnnnnnnnnnnnnnnnnnnnnnnnnnnnnnnnnnnnnnnnnnnnnnnnnnnnnnnnnnnnnnnnnnnnnnnnnnnnnnnnnnnnnnnnnnnnnnnnnnnnnnnnnnnnnnnnnnnnnnnnnnnnnnnnnnnnnnnnnnnnnnnnnnnnnnnnnnnnnnnnnnnnnnnnnnnnnnnnnnnnnnnnnnnnnnnnnnnnnnnnnnnnnnnnnnnnnnnnnnnnnnnnnnnnnnnnnnnnnnnnnnnnnnnnnnnnnnnnnnnnnnnnnnnnnnnnnnnnnnnnnnnnnnnnnnnnnnnnnnnnnnnnnnnnnnnnnnnnnnnnnnnnnnnnnnnnnnnnnnnnnnnnnnnnnnnnnnnnnnnnnnnnnnnnnnnnnnnnnnnnnnnnnnnnnnnnnnnnnnnnnnnnnnnnnnnnnnnnnnnnnnnnnnnnnnnnnnnnnnnnnnnnnnnnnnnnnnnnnnnnnnnnnnnnnnnnnnnnnnnnnnnnnnnnnnnnnnnnnnnnnnnnnnnnnnnnnnnnnnnnnnnnnnnnnnnnnnnnnnnnnnnnnnnnnnnnnnnnnnnnnnnnnnnnnnnnnnnnnnnnnnnnnnnnnnnnnnnnnnnnnnnnnnnnnnnnnnnnnnnnnnnnnnnnnnnnnnnnnnnnnnnnnnnnnnnnnnnnnnnnnnnnnnnnnnnnnnnnnnnnnnnnnnnnnnnnnnnnnnnnnnnnnnnnnnnnnnnnnnnnnnnnnnnnnnnnnnnnnnnnnnnnnnnnnnnnnnnnnnnnnnnnnnnnnnnnnnnnnnnnnnnnnnnnnnnnnnnnnnnnnnnnnnnnnnnnnnnnnnnnnnnnnnnnnnnnnnnnnnnnnnnnnnnnnnnnnnnnnnnnnnnnnnnnnnnnnnnnnnnnnnnnnnnnnnnnnnnnnnnnnnnnnnnnnnnnnnnnnnnnnnnnnnnnnnnnnnnnnnnnnnnnnnnnnnnnnnnnnnnnnnnnnnnnnnnnnnnnnnnnnnnnnnnnnnnnnnnnnnnnnnnnnnnnnnnnnnnnnnnnnnnnnnnnnnnnnnnnnnnnnnnnnnnnnnnnnnnnnnnnnnnnnnnnnnnnnnnnnnnnnnnnnnnnnnnnnnnnnnnnnnnnnnnnnnnnnnnnnnnnnnnnnnnnnnnnnnnnnnnnnnnnnnnnnnnnnnnnnnnnnnnnnnnnnnnnnnnnnnnnnnnnnnnnnnnnnnnnnnnnnnnnnnnnnnnnnnnnnnnnnnnnnnnnnnnnnnnnnnnnnnnnnnnnnnnnnnnnnnnnnnnnnnnnnnnnnnnnnnnnnnnnnnnnnnnnnnnnnnnnnnnnnnnnnnnnnnnnnnnnnnnnnnnnnnnnnnnnnnnnnnnnnnnnnnnnnnnnnnnnnnnnnnnnnnnnnnnnnnnnnnnnnnnnnnnnnnnnnnnnnnnnnnnnnnnnnnnnnnnnnnnnnnnnnnnnnnnnnnnnnnnnnnnnnnnnnnnnnnnnnnnnnnnnnnnnnnnnnnnnnnnnnnnnnnnnnnnnnnnnnnnnnnnnnnnnnnnnnnnnnnnnnnnnnnnnctagcataattttatgatttgctaaaatttactaaaaattattaatttttgtatatctcatcctaaatcaggagaattagttattgagacctatcaaaattggtgttttttaataaattagaaagcataagaagaaaagtattcaagaaattaccgctcattcttctaaaaatattaacactatacttttgtaagattttttttttacttttatttctttaactactctcaatatttttattgttttatgatttactaccaatacatttatgacagcagattataaatgaggggatatttgacaaaatcgattaaaaaattcccaaagtagggcaataaatcttccattattagtggggatgggcaactcgcagttaactattcattagtgaaaaactataggttgcttagtgcttgcagcaatttcagatggataaaatatatattactagcgctcctctctttccatataagccatttacttacggagttgccaatggacccagatgtaatggatattaataaaaattatctgcagtcgatatgatatttacttatttactgagtttgagtataaacaatttttttaattaaaattaactaatatacacatgctgcatgcattatctatttttagataagttatcaaaatcaaaatggtgtgacagagagttggaaaatgattttgtatgtatataattagaggtttaatcttaaatttgtgtgtaaaaaaatatctatgattaatttttgaccaaaatcacaaataaatattattagtatttcgagaaattaattaatcattgactctttggtcagaaatatcttaaattcacttaaaattatgtatttctttactagttaaaatgcacgagatattgttaatttgtaattgaggcttattatcttaatcaatctcacaaaatatcaaacatttaaacgtggaaggttagttttgttccatatattagcagcagtacgaattagtgttagaggaaggaagatttctgttgggtttccatgcgcaagatatcatgtcacggaggctaattaagtagctgttgcagtgttgttgcctgttgaggatggaagctctgccagcttaaacgtcagagctcgtacgttagctattgtatcttagtttctcagatgaatagtggggtatcaaaaactgatatcatatatggtcatggttgttgcaattgccaattggtgagagtgagatcgacactcttatgatgggtcctatccctaccctctccttcaccacatgagaacgagaccaatcctagcaatatgagcagtgtcacttccaaataatgagggcaaaaagtgccataaaaagacgagaattttaactaacattgcagtagctagggaacacccctgctccttcagggtgatcgtgatcatcccctcatcaccttcattcctgttcactttcaaacattaattttttggtccaaatcatcaaccccattttatttcttttattttttcaccaataaggtttttaatttgtttgatttagttgaacaaatcagttatgtacgtatctgtatttaatttttaaaggacatgatgtaattgaaagtagcttcaagtttcatcatatattcctagacatgcaatattaattaattaattgccttctcttgatatcctttctttgatatgaggtaaaataacagtgctagctcaagacatggaatgggaaacagaataggagtactacttgataataacaataataaaaaaaaaaaaatccgagatatgcaatgcagcataataaaaacatttgtggtcaataatggttggttgtgtagtctnnnnnnnnnnnnnnnnnnnnnnnnnnnnnnnnnnnnnnnnnnnnnnnnnnnnnnnnnnnnnnnnnnnnnnnnnnnnnnnnnnnnnnnnnnnnnnnnnnnnacaaagttgttagctgtttgccaattaccagtgagtagtttgagattccctttgaaacaagtctagattcaaatgttgtgtacgaaaaaaactattaaaagagttaattttactatgttactaacttactatgttctcaatttaaacaagatttttttataaaagatatttatagttctagattaaaaaatagtagttaattcagttatagaaacgagaatcaaaatttaaataataattcaacaatcaaaatttaaataatttgtccaagcttttacagtgctcgtagaaagatcttgagatttgttttcagcgagaaaaagagttagcttgtttaacattttggtgacggtgacacccggtatgagactatgaacatgtttgattttcaatctaatttattttacataaatatttaagaccaaatctaatggtccactacaaactgaactcaaaagaaaaggtgaaaatattttgtcaccaacttcggttaaatggatattcaaacaattaccaagtttgcatgctttacatgattactagtattttagtatctacattacattgagtaaatacttattttatataactaaaatttatatttgataaatatatttaaatatttaaattatataataattaaaataataataaataaatattttgaatataaaaatatgtttttagtttatgatgaacaatatatatcgtaatatattgctatttttaatttaaataattttaaaaaatgttaaaatttaaattacaacaaaaagatattaaaaatgatagattaaaagacagtaacaaatttattaatttagaatcgtaggtcagtggaaaaaaagaagctaactaatattagctacttatagaagaaaagataaaatttcactttcaaaccccatgcttgaagggaagtgagaaattggagagtagatggttcaaatataataagctagagtatttatttgtaattttatcaacgtcagatggtgcatgtggcatcctgaattatacattatttggcccatgaattagtgttgaaagagagaagaaattaaattaaactttttagttcaattgatattaaaagtataagaatatatcatatgcatgttaagattttatttgaattttgaacataaaattaatgtactccctttgtacctaagacgtttataactaattcataattattaataaagttagttaatttagttaatgatattaaatttatatgtaattgtaatatttttcaaaatcatcttaaattattggatctaactatattactttttctacttaattatttttaacctaaataagtattgcatggagagactagttgtagtagtgaagttttaaaactaaactcttcaattcccaaatcctcataattaagataattaagaaagagaaaaggacaattcatagagtttattatttatagactaaaataattaagaatattttgataaaaaaataattaatacaaggaaaagttagaaaataattttataaaaaaaataagaaaatttcaaaacaatgtctaatatttagtgacgaaagaaatatatgtttgaaagtaatttttcagatttaattacaacttattaaaccgtttaattaatattaaaactataaaacgatgtatacgatgaataataggagtgtatttaaaattttgaagataaaatatgtatttgaatctggtatctaatattcattacaacttgttacattattcaattgatattcacatgataagagcatataccaagaatgtgttaggagaatgaaattcactaatacatgagaatattcaaatagtgaatgtggaggagaatgagtagaccaaagagcgaaggtcatgaggaaacatatagtcttagatatttatatatataagaagatatatatatgttaaattattcatgtggccccttaattatattttaagttataatttattctttatttattaaaagttataaatgatttcttaagtattatattttataacatgtttatcctttttgaaacatggattgatttattttattttattttggggcatgattttaaacttttttattaatttactgtctcattaaattcacttatattaaaaattatgaaattaaactaatctttgaaacaataattatgagatataaacaagataaaatcgcataaaaaataagtcttttgagcaattttttagttgattttagagatttttttgttttctagttgccccaaggatattttaaaagatttagagtctaagagtgaaagaaggagacaaatagagaaaataaataaagaaaaagagaaaaatgatcaactaacaaatatgtaatgattttttttaaaagaatagctaaatgattattcactaagataacgaaaaataattttagagtaccatttaatcggaaatcatcattcatataattttgaaattagttattataaaagtcaataaatatacatgataatttataaaattattttaaattatccgtatataatttttttcctctaaaaaataaagtacaagtgttattaaaaaaaactagatatataaatataataacccttttttattctcacttgatggagagggaaggacaaaaaatctcaccctgtcctatatctctcatgctcaattaatgtcatggaatacaggtgctttgttacacccatatatgcataagggaatctgcttctttgaactctaagtcaataaattaaatggttgaaactaaaatttgttcattccaaaacgtatattccctttccctcaacccctccaatacctctcacaaaccttctaggctatgaagtagtaatagataatgaaaatagtccgtagcgatatcctctcgatcaaattcgaattatgccacatgcaattggcatcttgattatttttatctcgcttattcttctttaatttggccttgccaatgccccaacgtgaaagaaccttgtattcgtgaatcgtgtcaccctcttttttcgacctaattaattcttactactagtgccacattattttttattattcaataattctttcagctctaaccttgcatgttttggtgtattaatttgctccccatttgtcaccacacgagacaggttatgaatctgctgtcgctttttacttctttatcttcgtaacattaccaaaattcgtatctgatgtcgcttttgcttaatttccttcttgacattacagaaaatcggtctatttctactcttgcagcatctgttgatcaatattccgtatttgatcaatttgctttgcagttgcagcatatcagtaacgtttttatttatttattatcagaatgcattaaatatttattgtatcaaaaataaagaaataacaacgtgatctgtttatttgtcaaaattagtttataaattaactgaaaacttataaattaactaaaagatgatgagttaaaaattaagaactgaaaaggcaaaaacttatagattaaatgattaaattgagagtatttgatgagataatttaataagttaactaataaatataaaatgacaaaaaattaatctaagtattttgattatcattatatatatatatatatatatatatatatatatatatatatatatatatatataattttgaataacttatcatcttttaaatccctaactacttaagggatttgagcctatcatcacccttcaaaccaaaccgcacttcttgattagaaagattttatatcattagcaactgatataaaactcgcggggtacacttaatctcttacgacaaatttttaaatttgctaattaaaaatacctcttgtgtaaaaaaagctacaactttatgctgtctttttttttaatattcatgtctttcagcaaatgattaaaaaaaaagaagctaaatcaggtaaaaaaaagtgggaaaaaaatgaaagaaagaaactaataattacggatggttcgatagctttagcctttaaacaaattttaagcgtgcgtgatctcaataattgagatgttaaatctcatattagatctgattgatgacaaaagttggataaatgaattttgttgaggacgagaggggatggctaaaagaagatgatgctgatagaaatagtaatggacgtgacctcagtgttatgaaaagggaggtgtagggatgcattgcatacgtagttttgttgagttgagttcacaattcacataagaaagacacaaatcacacaaatcaacatgtactttttgtccatttcctatgatttttggccccactctcgtttttgcagatcaatgtacgctactatctagacacgtcttctactttttgcatgcaggatgttctccatattctttctttattttatttatcaaatactcaacgtacaagagagatatgaaatcattaatcattgtcattaatatatacattatatccttgacccacggataaaattgtttaacattataattgtttttgtcaatatatttttatttaattgttaatctaaatattgtcaatataatatagtatagtaatatttgatacattaataatatattaatactagctaaagtcaggaaaaaaaaatactaccagagttatttattaattatagtataatgtattataatttatcaccgaaggccgcgccgattgctttagtttaattaatgatttaaagttctagatgcaattgaaagcaaaattttactgttcataattaatgattttactatacttaaataaaattctctaatgatctataaaaaataataaaacaattaagtagtgtattacaattttaatgcaaactcgcaatatacatattaataattaaatttttgtcaatcgaaagttatgctatcaacaggtaataattgatgtcaaatagttaacaaatgacctttttcttttagtattgttatataggttaaatcataaatttgtatcatctgaatgttttagtaatatatcacatatgaaacttttcacctttcacgtttcttttaattaacggaaatgaaggtactcttatgacggccaaaacgttttctatcggtatatataatcgtgattatttcatattgttttggtacacactgtttcctctcccttctcctttctttgataggtaatttaacattctataaggatgcaaaacaaaaatgacgtcgtgaaataaacataataaatatataattcagatacacttaatatgtatagaggnnnnnnnnnnnnnnnnnnnnnnnnnnnnnnnnnnnnnnnnnnnnnnnnnnnnnnnnnnnnnnnnnnnnnnnnnnnnnnnnnnnnnnnnnnnnnnnnnnnncaaaaagttatgaaataattaaatgtgatggagacatgcatagaagaagtatcattataaatatccaataaaaaattaataataatattgtgaaaaatattatataatccttatagtcagcttaatgacaaaggatttgagtagttatacaaaatttcatattcaaactttattgtcactgttttgtattaatttaacataataggatataagatatacaattaaacaaatataacttaattaattgattagtatgtatgcatgagtattgaaaaattctactattgtgttgtattcttataaataaaaaaattatataaatagtttaacttataattttgtacagtacaagtagtaaaacctgaagaattaacttcgttcgaagcaaggttagaatggattccagttctaaaattatattaaagttttgttttctaattatggggtttgagatccatgcattacaattacaaactgcgttcgaaacaaggttagaatggattcctgttctaaaattatattaaagttttgttttctaagtatggggtttgagatacatgcattacaattacaaactatgtctcgaacaaaattgactaaaaaaagtacatgtaaataaaattatataaactcttctaaaatcattcactttaatgaaaacaaaattgtcatcatgatttttttgctatggttccagcatcatacacaacgcttttgtccctacagtcaatcatgacactttaatttggaagaagaaatcataacttttaatgtagttctaaagtcgataaaaaaaagtagtgttatatttcatattcaattatcttattaaaataaataataggatgatgaaaattaacttcggtgatgattttgaaagatggagataaagggcgaattgtccctagaatgtttgttcacagttgctcattattaataagagatatgtttatactaaaaataaaaaaaagtatagcacatttcattttttatgggtggaaagtacagtttctaaaattcgaaaatataatataaccgtttcttagagggagaaaagtgtattttattttattttaaaattttattacttaattattcatctaaattaatacattctaaattttagaaggccatcagcccatatattaatgacttaaaagggccggaaattttaaaaatgttaagaatcaaatgtaaggaaattacttttggagaattaaaattaatatgattcaatatttaaagtactaaaattatatttaaaactttcaaataatctaaatattttaaaaaattatttaatgcatttactctatatagtcatcaatctatggatacacaatagtaaataggtaaatttaatagtagtaccttaaacagatttgttaagcaagttaaaattgaaaaaaaatatattaaaagttacagtattaatgtatttctgttatgatttctaatacacatttaacgcaatttattattttgtttttttattttcttaattaatgtcttaactcttaaagaacatttatcaacactctccttctgattttgcaaaggtttagttgaaaagattttgaaacttttgtttcatggattatttagtcatcattggaaatacaggatcacaaaaaattatttcacatttgttacgagataataaaaatcaatcctaagtatattttatttttagaaaatatataatctcacgttggatcaatatttagtctcaggagagaaagtgaagaataattattcccatgagataaaatacttctttatgagagaaaattcatatatattattttaattactaatcattactccattactctctcattatttctttatgatactgtttaaatttttttcaatcccacaaatttgattcatgtccaaatagtgttccctcaatttggtttattatcaattttattcttatctttccctccgatgctccttcttttataggcaattcttactctctttcaattattgtaatggttgaacacatggggatacaacgagggtgtaagtgtgtaacaaatttttttataataaggatatttaagtaattataatatattcccaagaaaaataactcaatttaattattcctggaaatgaaaaaaacaatcccaaccaattttaaacacatttttaataatatttgaaaataacattctcgtgttatattttcagaaaaaatattcatgagactaaaaaaagtatccatcaaacaaatgctcccttagaattttttttgagatttaaaatttgtggaataaattatctattgatttttcatcattatttgtaagataaaacatcatactcgtttgaaatgctctctccatttcttttgaattgtcggatttttggagaatttttgtatctataaatttgcatgttgcttccaaagttcaagaatatatttttttattgaaagggattaaagtcaatattaaaagatttataacaattcagacatcatgtttaatcaattaagttagatctctttatagttgactttcatattaattactcttttatatttttaattaatttacacatatttacatgtatttattatgaagtggaaaaaatgaggaaaataaaaaattgcacaactattttattagaatcaagaaaatttattatattttttagtttttacataaataactttaaaaaacaaataaaaaaacggaggaggtaggaaaataaaaacaatttcagtacgaactttaatgtcttttttttagtatattttaaggaaaatgttaaaagttacgaaaatattttcgtcaaaagcacacgaacgtgtattcaatgaaatttcatctttttattttcttaattatttaagaggagtgttatatggtacgaaggacttatgtacgaaacggaccaaacaatttctgataaaaataataaattaaaatgttagaaacaaacataaaaaaccaaatgatttatttggttttttattttattttttgtttagtttaatttgattatttatcttttaaaaatttaattttatcttttatcttattttttagttcaatttattctttatcttttaaaaaaattattttaattatttatctttttttgtttagtttaattctccgattcatttaagatttacatcattaattaagaatgattttttttgttaaaaatgaagtggagagaaaagaagaaaaaattaaataatttttttaaaataatcaatgaagtttatcaaacaaagtaaaataaaaaataaaaaaagataaaaactaaatcaaaagaataaaataaaacatcagacaacttttttaaaaacagaaaagattaaactgaaccaataaaataaaagattaaattgaaatttttagataaataaataaataaataatcaaactaaattaaaaaaataagataaaagcccaataaacttttgattctatgctgcaaattaattccgttaatcacataagctcttggcgtttcccatggatctcatggagcaaattctaaacttttcatttgatgaaacaaccaccggaaacactaacttttcttacaatgctctaaataacattaaaaggtaagatacttaatttgtgttgaatttgaatgtagaggtttcaaatgctttgcaccgccgcaccggtgcactgttaaaagcctaaaacattatttaattgcacacaccgcaggagaagaagatgagcattaagcgagaaagatgaaaaaaaagaattgaaataggtcttcaattggaattataatagccaacgaaaaagaaaaaaagaaactgaagggaaaaacataaactaagaagaagaataacatgaaaagaaagataagagagaaaccacgtcattggtgattaaagtacgaaattatattcgtactataaagcatttctcattatttaattagtatttgttttaggaaaaaaaaaaactcaaccgttcaatgttgcgttcgtgctattcgtgcataggctcgttcgtgctaaatagcaggactcatattttaaaagttgaattgattatgtatgaagaattggtctacgagctggagaacaagaaaagtgacatttcaattttcaagttccgatggaaactgaagacagaatcatacaaggtaactatagtgacatgaacacttgggcagtgagccggtgctggtgacgattgtacaacaagtctactctctagctcgttacgcctattattctgaaaatgttcctcgtcaaggttgatccatatacattaagaaattagtggcattaattaatacaaaatctatctatatcctataataaaaacgactagcacgcacatgttggctccttcattttttgtttttttttttccttttcctttgcaaacaaaagtttaggtttaaacacttctatgcttgcttttaggtttttttcttcaaaattcaaattcaaattttaggttttacttttctcttttttatccctcattttcattatcatttctctctttcttctatgcttcctttccctctctttatcaattttattatatcgtcatcactcagttatcttttctatcaaatctctttccttcctgtttttctttctcttcctccatctttctgttccgattgtcaataactttgatacaacaagatatgacgtgaaaaaaattatggagagcaataaccttcttaataatgaacaagttatttgtttttttttgcatttgtttttgtttccttttcagctagagaatggtgtggatggattgtttgacaactttgcaaggttggatttatgaatttcaagtgttagtcaatcagcaacaaagataggtgatcatctctagttagagagttcttccatttgtcaactatgtttgatggatgaattttgatctcacatttttttgtattattatgttttataggttggccagctactcctttgtctttgacatataatctattttctaatttctaattctgttatattttttcagagtgcaaatgctcaacgagaaacttcacgtcaaacaaatgagttataaaagtaatatcaattcattcattttttttaaatttttttgttaccatcatttgtgataggaaatttacctatcgttgattaatttctgtagtacttaatgaaattcaatagcagcccaggcaacctaatggagctttcacctttttttttttttatgatagtcgtgttgttgatactgctttaattgcccaaaaattatgtaagaattaatattcatcttgaatgttatacaaatctttaaccaaattatgtcaatgttatgctaattatgttacttttcaagatcatttgctgaagaagatataggaagacatggaatacctatcccattagctatgagaaatgcaacgaagtagtagttgctaatttacatgactaccgcaatggtcagtattttacaaaaaacttgaaccataacttataattaatatttatacgtttctgtcaaacaaaataattaagagaatcaaagttatacacattttctattaaaaactattgcaatatagttagttttttcttcaagaatattatgacggacaaagtacattattcaatctaagattttttttatcttagaggatatttactttttattgagcagataaaatggtcagcatgctttaaaagctgattagttgtgtctaggaggaatatcaaatctcactttgatttatcgatgatgttgaatatttatgtggttatttaacaggttttcctattagacgaatagaccataattaggctattggtcatgttaaacttctttatgatcttatgacatttactatttttttttttgaaacaacatttaccgtatttgttacaatgacaatgtagaattccgaataaaaatttactttactaaacaatgaggagctcacttttaattttccagaggcacttcatgcctttttgtgttctacttttatctctgttgtgcattccttatcttgaaatgcttgtgtctagatttaaggtcgtatgcttttatcatatcttatggtgtgagccaaatgtaaacaatatccaagaattaaatcacatggtgttctcttcgcttctactatttttcacgaagttgaatgtccctaagatgagtatttatgagaagatcatgatcgatgcaactaaaaaaaagataagagttgaatgtccctacaagatcccttcactagagacaaaaaacatgcatcttactcattgctcactcaagaaagataagtgttgaatgattaacgaaaagataatgatttttcattatattcttttattattaattttgggtctttatgcatatatttaggtttgaaacgaattttctctccatccttaatttttatgcattaatgggcctaccaatagtattcatagataaaacaatttcaaacatcttatgctggatatatatatatatatgcaaacaaataatattatacaaggtattagtaataccactgggttataaaaaaatcacaaaaggatgctaaggttaataaatatttatcacacaacacacttaataaatatcaagtaaccaagtcattactccttctaacctgttgactataaatataatagaagtagcagcactattggttcttatgtgcttcaattggaatcaactcatcctgcctaaaggagcgtgggtgcaaatttaactgtttatttattttgttttttttaataatttgtttatgggtgttgtctaaagaagaagacgatgttcatgcaattgatgtaccacaaagtatgggttgacaaatttttttactggagtgctatgatgggttgatcagaaatgtcgaggactccgggttaggtggattgcatcaaagagaggagaacaatgagagtagtgcattatctcctacactataataaaagaactaccaagcactcccatgtgttgttagtcacatgatttttgtctaattttaaattttgttttggttaaaagcgttgtgttgagctccgctttctttcttctaggttgctccacctctcaccgctctggtcctgtcatcgcaaatccatactcatttcctgctattattcctctaagtgatgagaaaaatgaaatagagaatgaagcacgggaaaaagaagaaagcgtaaaatctagaaaattactataatattttttgcctgtataatgtaaataattaaactaagttggggttgtaatccaattattttgtttttgcagccattgatgacaatgttgtaaggtgtaagttattttcaagggctctttagattttgacaaatggactttactgatttccaagattaagaaaggtgtaagtttaattttcttttaatttaactaaataaattgactaattaaactattacttttttttttattgtctatgtacaattccacgggaatggtcttgatgctgctggtaagaccactatcctctacaaggtcaagcttagagagatcgttactacaattcctaccattaatgagtttctaaattttctctttttctccaaccttaatagatgtgttattctaattattttttacatgtagaaggaatatgtcttatcgattaagattgtatagaattatcttaattaatcactaatgtcttaattatttagttaggattcatgataataactgacttcaagaccactaggcctgaataccgagatcccaaattatgttggttatcatgttttgcttgatgtgagaccctgaattgaagttgatctaattgctatgtaaataaaataatcttcgacaactgtaatattactttttacaaacgttgcggggttattatgggtttactatttggcgtgtgagagtgctggaatgttttgaatattagcttcattgtttgggatgttggtggccacgacaaggtggaaattttgattctcatgcatcccttaaaatacaagatatttaatgcatatatcactgattttaatattttgctccatgtgtacttttaaaatgaaaaaaattagtagttttaatttttaaataaataattttacaataattgttttatgtgttttttgtttacttctccacctttggtggtaagtatctattctcattcatctttttcatgtttaaaaatctcgaagtattggatgataaaaaaagattaaaaaaatattgataatatactttttgtttaatttaagaaaaataaaaattattaatgtattctaaacttcttacatgatttacactctatgaactaattaaaaacacattctttggagtaaaggaatttttatctacttcttttcatattgctttctattattttttttagatttgttctcttgcacgattactcttaagcttgaaaggttaccacaagtcattttgatttgaaagtctttattcactttgttacctgattaacaaaaattcattgcagaagaggagtgaattggaggatggtaagcaagggtgccttcattcttgtgttgcttgtggcattgataggtatggtagaattcaagtgattgttttttctaaatttatttgctttggaggtgttacttttttttattaggaagtgttacaatgtttctaaagtctttcaaccctctcttaggctctagtaatatcactgtatattttatcattagcatttttcttttaattattcgtggttatcatttactaattctacaaaattgtaaataatggatacaattataccaagaaggtaatttcatgacattcaatttaattacttttaaaattagttataaatttaaaattagacacaaaatatgtaaaaatatattgttataaaataataacaataacaatttcagtgtgcaagggtgaagatcgacaagtatacatgatcccatataaagttgtggataaatacaagatttttatcgtcatcgagatttaaggacggggatggaaacaatgttgagaagcaagaatgagaaataacataaaatctcgtggtgattcattgtcatatttatcataaccattatttatataatttttttttaaataattatatataaacataagattaaataatttttttattttttattttattttttgggttcaattttgttttttaaatttaaataaaatactttgaattattctttttagatcatttatcatatgacattgttctctgatactccaaattagttttacaattgatcttcaatatattcatgataaatgcatcttaacagttttaaatttttacttcataagttaatcttttgtaaataatatattaacaacatatttgacgacaattttgttttttaaatttaaataaaatactttgaattattcttattagataatttatcatacgacattgtttcctaatacttcaaattaattttacaattgatcttcaatatattcatgataaatgcatgttaacagttttaaatttttacttcataagttaatcttttataaataatatattaataacatatttgacgacaaaaaactcaataaaattaaatatgtatttgattgtttataaaattttaaaacatgaataatcataaataacaatattttataaaatatattatatattttaattttattaattttggttcttatttgataaattgtatacaattatgattaaatgtatacaattatcgtatacatttaattatgcaaaaaatggaacagccaacatgtgtgcattttggtcggttacaattaaatgctcagaatgtttcagcaaagtctggttgtcaacttataaaataaattatatattctaattttattaaacttagttttcatttactttagaatgactaatattttatttttaaaattgttataactttaaatgataaattgttaattacatttcattttcaactttcaattcagttgtttgactcataaatatttagtaacatataaaatggtgtatcttatattaatcttagttctcccttgctaagttatacaacgttataattaaatgtatataatattacgtgtacacttaattttatagtctatcatgcatccgcatggatgtagttttacactattttaacgaaaaacattcttcagtatctttttattttgttgtttagttattatacattttttaacttccactatcctaactaccggaaaaaaaggcatccaattatggggaaaatatgtgagatgtggaaaatcaatttcatacatagtttttgttaggtatgtgcagacaattgaatatatccgtgattattaaggctaaaataggcaaaattggtaacaaaaaaatgtttaaattaaatggagtatatattttaatcattccattaataataaaaaaagaaaattgatttttgaaagttaatgatctttttttagaaggttaatgatcttttaatttctatccttgtaaggtactagcgtgtttcaaaattcaaaccatgagtaacatatatgattttcaataacgaatattattattaattccgttaccaatatattagaaactttatattttaaaaatggggattggagtagtattttttaagaaaataattctcaacagttgacaaaagaacgtgtagagaaatataattaaccaaagaaaataatcaaaagtttctcacttttattataccttctgtttcattataattttaggtttttttattcagaccaaggaaaataaataaatagacaaaaaatgataataaatttataaaattaatcttatcatcattaatttattttttatttttatagtccatattattaatgttataaggtaaataagtgagaaaaataattaatattatattaaaaaattaaaataataattattttagaataatttgttctttattacataacaattattatgaaatgcgaggaatatatgctatcaatcacgcatgttagttaaacttgagtttctctctacttaaaacttttaattaagagcacgtcctaagtgattgcaacatgaaacaatgagggaaccaataaataataatatatgagggaaatgatatataaacacaaataacaaattttatatttattaagacagatggttgacattatttaattttattaatcttaaataaaaaataagattatttttaaaatatgtttcattaaaatttgatatcataaataaataaaattaaaattaaatgatttttttttaaaatgataatttaagtatgataaaattatttattatatttaagttcaagatacaaaatcttttatatatatatatatatatatatatatatatatatatgagtttagagaaaatatatgttatccatcatacaagtaagattttcataacccggattactcacaacttttaattaaagcaaacacaagtgattgtaacttggaagttgaaacactgaaattcatggctacaatgatgtgaaagaaaataatccaaaacaatgtatacttgcaagctatcatcaatcttacatgtaagtaaaacaaaaaggtgaaataagccatggtagcaaattaaagtaagctgcattgatgtaccaaaaaagagtaagcgcattaaatagcaattggcaattactataatgaaatgtcagtgatggtatgaggggtatatatcatatgaaaaggctatcttgctagctaatgatgagagtaatatatatgattaaatttctacacataatatcatcatattgaggtgtctgctaaaccaaatagggaggtagagttgaagaactcggcatttgattaattaatagaagtcaaggctaaacatatgtatttactgaattttataaaagtccatatgttaccactattcttttccacctagctagtgtaattcctgttagtgtggaaaatgaattgaatcaaagagctgaataccgaacactaggccctgttgaaaatgctcctaacacgaggtaataatcatgcctaactaatgattgcatcccacatgcttgaatatatttaggactttaattctgatcattcaaaatggcttctcagttatatacacacattgactttgcttatacctcaactgagatcttgtatttagctatcatttccatttgttttctttgctacatggagacattacaatctcctatcattgtcagtatccattgatactcatggttttgaaactttataggcttctagctactaatgaaaacatagcttcatgtggagacatgtccaagcctccaactatttacatccctcgctttatatcacatcgaattgaaacttctatctatgtccttttatacttgttctctttcacctgtcactagtttaccaaatcaaacctagacatcattgctgtgagctttgtcaaaactcatatgccggattattttcaaccgaatgtgtgtaaaatgggatgatccattaactaaattccaaaaatgtgatcgtgatcattagattcccgcaacttacttgcatttccatcaactatgtgcagctgtaaattctgtttacagtcataaattcatacatgagttgaattaggtcacaggtgaaattgattagttaacattttcatttctttttaatctatggaccatagtttcgattgattcagcagcagtcataaatataagactatcaagtgtgtataaaattcatatccacattagattgctttttttatgaattattatcatttgtatcaactgtttgttataattatatttatgatatgatggccaattagatttttaagatgtataaattataataatgcgacagataatgaaagatgtgatgtaggctttctcatcttaattaattgaagttttgtctttgactcaattctattttgttatttcggcttcttgaagaaccagttatagggttatccatcgattggcacataatttgtttcttctggctcttgatcagattgatcgggggagcattaaactataaactatatgaaattgaaagattcctggacaaacgctaaagagccttgctggaaccatccaaatgagacaggggccacccagatcaaaactttattcatgaattttcctgactggattgacgttaattttggtacagaaattataattttggaaactagaataatggggtggtttggtttccatttgtagaggactagaggctttgttttttcttttgatgtgaggagaatatatacattccaacttcatcctaataccttattcatatattcaacatgtttgtatagattttagagggaataaaacattgattgagacaaaggtagaatgttttggtggaagcagattttctattttcctttcaagacaaatctaagctcaattaaggatggtgcatatggacctactaaccacccttatagttgggcctccaaattacccatgctgatgatcaaagttgaatttgctcgtgaaataattatttctactaccattttcaaaaatgataggaaatagtcaaaattacccttctctctccccccccccccccctctcattcccctcttcaactctctcttccccctgccaaaaccacccaacctttccccttccctctcccactctccttctcattctttttctctccaactctttctccttctcgcctttttttttcatttttttcacaatgaaaatacgttttcattgtgtttttgaacccatagcacaatgaaatcttatatctattatctttttttatttaaaaaaaatatacaataaaaatgtgatttaattgtgttatgggttaagaaacacaataaaatcgcacttccattgtatactttttcaaagcaaagaaaaaaacccacaataaaagtgtggtttcgttgtatatcttaactcaaaatagaacaaaattgtattttgttatgttcattttttagttttgtaaaaatccacaatgaaagtgaaatttcattgtgttattcatcaaataacacaatggacttgtacttccattatgttgttttcaaaacatcacaacggaaatatgattttattgtgttatttgatgaataacacaacaaaacatatattcattgtgtttattttttattttttaaattatttaatttattgtttaatttaattgtttaattaatattttgtttttttagatggctcgcatgaaacatactgtctttgtcttagatccggaggcacaaaggcaatgtgtgactgcatcaacacgtggtgatggagagttgacttgacgacatcaatcataggtagagtcataaccaaaggcacaagcataggcacagctacaacctcaaccattgataataccagctgatgaccgtatcattgaacccccatctggaggaggccttatggatttaactttgcttcgatcctataagaagcatgtagttgttggccatgtatggatcgatcatcccagaaaggagctgaagttaaaaaagtataataaaaatttgtattgtgtacccttggatccccattgggtcaagcccaatagacagaagcaacaatccgaattgtagaccgagtcattgcactgttattatcttatctaatctaacataatcatattcttattttatttaatcatatcatattatttcatcatatcttacctaataatgtcatatagcgagaaaaatatcatatccccaacaattttgaagaaaggaatatgttcaggtcttaccataattaagaggattcaggcttaccacagagctaaacatattacacttttatgttctggataggcacccaaaccccagaaaactccaattctggaacttaatgatacaaatttaaatgtatattattttttatttatagaaaatatattataattaaaagtttaattttctttatatctaatactaattatttcattaatgattaaacataaaaatgtaatactattcacatagttattaagtataatcacgtatgtaaactttttaaagaaattgtttaaccaagtgaaatattaagaaatggagtcttgatcaagcaatatagaaagttgggcaccactcacttccaacctaataaaagtgtttacaaaattcctttgttaagttttggcaaatcatcaacatatttttgcaagttgcaaatttggctatcaaaatccatatattccatcacgagggagaaaaactttgcgacacaagagagtttataccacactaataaaaaaaaagagtagaatctataccacatgaaaatatcttaatatccataagcatgcataaacagaaaggcataaggacacacacaggtaactaactgagaatcattacctccaagttgattattacacatttaactctcctgcttatttttctacgttttctgtctaagaaagacatcaatgagagagaagcgaaattgagaagctcatagacacacgttcatacatacaatacaatagtgacaatgcataatcatgaaacatgcttcatgcagtgactgcttcttcattcacatactttagctcttcattgaaatgttcatcaataccacatttactatccataagatcaccaccacaacctccacagccactactctccaacctatttccacaccctcctccacagcctccacaaccacctccacaaccaccgcaaccaccactcttcaacatagatccacaccctcctccacagcctccaccacaacccgcaccacaaccgccacaaccaccactcttaatcaaatttccacagcctccaccacaaccaccacaaccagcaccacaaccgccacagccaccactcttaatcaaatttccacagcctccaccacaaccagcaccacaaccgccgcagccaccactcttaatcaaatttccacagcctccaccacaaccagcaccacagccaccactttccactgcatttccacagcctccaatggaaatttcagatttgtatgttatcccctcatcttcattgcacatattagtagaactcaaccccgttccattcaagactgtcttttcattttcctcatttgggccattcaccttcaaatctttacttttagcaatgatgccttcatatccttcttttttcattatattggaagcaataaaagtcaaaatgattccaggaagcaccatccacttctcctttgcctatcaaattttagaaaacaaggagggagaagaaagcagaaaacaaattaactaatgtaaaacaagaatgttcctctatagaaaatgtttgacatagtagcaaaaaagtaaggtaccgtgacatgtctagatctcaagtcaagcaatgccactgctttgccatagggttcttctatggagaattcaacagctgttaggaaattcatttcatttccccgtttcccattgtgtctcagttcatagtctagctttcttccggggaaaattctcaccttaaccaaaatcacatgaatctaaccttagaactaagttcgaatccatctcatttcccacatttttatctttaacaatcttatgtccagcgtagctaatgaatatcatgctattggatttgtgaacactgtaatcaagaaccaagagagctcttggcatgacgagatatatttttaaaatggaaattctttagaataaatgcatacccttttgttggcaccagtaagctcaaagagatgaccatcatttgtagatttgtttggaaggtgaaacaaccaaagattctccaaaatagaccatccattttccataaactcagcaagagtgcgagtttcaccagatttcatgaggccaacaacctcctttccaggatttcctatgttctttgcattcttcaaatccctaaaatgtaatcagagataggaaagataatttttgagcttaattaattaagaagacttcattacaagtggcagtcattctgaataatatatgcaagataggttatgtggaattcaaacatgtatgacatttgcaagcatttgtggcagataaaaatgattgataatctaggaattagatgaccacaaggactaggtaattcgagcatcattcaaatgcaattaaaacaagttgatatttcgaagacacaagacaaacagcaaagaaaatcatgcttgtagaagcgacaacatgcataaatcactaagagactagtccccaacatgaccataagaaaatgatgaacacatttaggcagggagcttctattgatatctggcataaagtgcatacatagactgtacctcatttgaaggctgatgattctggtgccattttcatctgttacatgtgtccagcttttagcatgttgaggcctaacaggaaggttgaagagacatgtatttttggaaaatggacgagactgagtcatttcaagtgtatatggggcaagaactgggacagtaaatgagatggctactcgtaacaagattggctttgagctcatagtaccagaacccggcaccaactccaaccatttctcaacatagagttttgaaactgggtcaagatagtctttcatagagaaagatgcagaaccaagtgtctttgttgattttcttattgataacttggaagaagaagaggacatgagttcaaaaagcagctctcctgttggttcacaccggaaagatgcaacctgtttctctctagacactgataaaatactcagtctccttttagcatcaaaaaatgcatcaggctgtgatttggaaaataaaacacagagatctccttcctgtccctctggtaagtttttaaccccaatgaactccaagagaacctggttggatgaaagaggaaattacaaatactattctcatataaacagaagctgtttcagtgatatttattcagtttagtttgcttatgcttttatatatacatgcagaacagtacaatgtgacaagaagctgaatcaaaagaagtgatagtattatgatctccctagtcaagaaagattgccattactatacacaggtaattttatttttagttgctaaattgcatcttctttggtatcctaaacaactatggttctatgtcaaagcagacaaacatactcaagagagagaaattgttagagggactagtgtaatacaactaggctctcgcctctacttgtcttatttataagacaagaagaacggttacattttgtagcagcacatggatcagtccattatctaaacagtcatccgttaagctctagagcacagataaaatgaccagcttgctgcttagaaaattataacccagttggagcctttataaacaaaccttccatttgtccttgattcgaacagtttatatccttgttatgatgaaaagctttgcaagccacagaactattctagggatctgaaagaaaacatttgcaccaacattgatcccataaaacaacttagtaatacaaacttatgatatgtggtaaggacttaaatttgcatattcttgtacatgacacaataaatgttgcatggacatgttaatatatgtatgcacataattcagagctagatattaaaacatgtaacatgacacataagaggagatcttagggtacctccataactttccgatctggtagcgaaatttcttgtgggtactcatttgatgaaacaaccttcttgcaagtaatgctagatggaaaagggttacttgtgataggagacggtgcattacccctatacattgctccagccttccaatatcttgtaccaaatgtgacttcccactgtctggtggttccagaaaaaccaagatccagtttctttcctttagttctgtctgagtctgtatcatcatgctccaatacttttccaagtgcttcattgaggtctttacaataagcaactggatgtaactggtgagaatgccagattaggtcaatatcatatgttggaacacaaaagcgttttatacccttttccttgtttctcttgatgagatgcagaaaccctttgtatctggccacagcttccttgataaagagatcatttttcatgtgcgttcttgatacctgtcacaaaagacgacagatatagaatccattgagaagatgcagcattatgtactagccacgcacaagaaagaccattggcaaatgaatttcacaaaattgtttgttatccaactaaactaaacagacaaataactgaacactgaactcatacatcaccacatatgatattaatgttatttggaaatgcttccaaacgattaaggatgaatagtctgaatttaagattttcaaaacaatgtattttgaaaccacatggatctattggcaagcaagaaaaatatagttaatcacaaattgataaaattgaagaagagtctagttgaacacagcctaaaccatgctaactttcaaatcagggctttggcagagacagagcatatcaagcatttagtaatgcaaagtgaaatagaacaactggataaactcttaactctcctttacctggtaaaagaatggactctgcctcttagcagctgaaatcaaatcatacttggtgtatttttcaagcttagaaatccttttagagatatcctctgggagaagattaaccaaatcagcattgtagggctcatcaggatacaatttattccagatttcttcagtttgccagccacaaattccttcaacagtagtggcaacaccaaagttgtcaagtacccgtccataaagttcctcacagtcagttttgtaccttacctgcgtaatagaatgaaccaaattttagtactaataacacaactcaatcaaacaaccaatattgctaataatcaggaaagtaatacatacatacaaatatatatatatatatatattctggtctgaagcctaccgggttgagcctgtgacagtgccaaatccattcacagtcaagaggaactaccaatggcccttcaaaaatcggagactcggaatgcttggcaagcaagggaatccaacaagcattgtacctgaatacacaatttcattgttgtaaaaccagcacaagaaacttaaaaaatgacctattttctgatagatataagaacagaaaatccatgacatctaaatctgaaaaacattgcaaagatttcatgggaactgcattgcaaagctgtcatgagtgaaggaaggatttttacacatgaatgtaaaggtccttttttttatcaacaaatgttagtttttattagtaaaagagattgaattcgtgactttttttcctctttctttcttccttaactatcaacatatcttatatcttcataaatgcccttccttaaggccatttatagaatttttggcttcagctcagatttttttataaaaaaaaagtaaaacaaaaaattgttttttgaaagaactctatcttcatcaaatacaagaaatacttcatagaatgttcacctatagatagctctgtcaagggcaggaccgtcatagaggtgacggttcttatcaacagttgcaaggaactgaagctgtttttttgctacgacctcaaggtccacgcttattggaatcttttgggcctcattccactccatttcttgttgtggttccatctctcaatttaaactgaaaaacagcaatctcccagaaacattttggtgtaaattaaagtgcctctgaaacatatttgtctaaacttcgcagtcaaaatagaagatggagcgataaaacatgatccacaaaatttgtttcccctatttcatgttctccacagtaatcttaaagaaaaaaaaaaaggtgtaatatttaaagaagggtctacaataactaatataaaagaacaaatattatctacaggttggtcaacgagaaaatttcaagagataaaaggaaggaaaccattaaatctttcaactaaactcatgtaacaaaaacaaacaaacatcatatgatcatccacaacatacaccaatacacaattacattgtatcaacattacagaaagagaataaaattaatgaaaaggccatttgggattaccagttacacagaaactgaggcagagaggcagaggctgtagctgcagacagggaacttccttaaaaggaggatctgtatgaatgactgtatctgactgagcttgtgaacttttctgtttctatgacgttgcaataggcattgtatgatacaactactcaaactagtgtctttgtatcttatagacttgtactgcagctgaaaataatgtcaaggatgtacgtctgatctaattaatagtacaaccaattactctatccacaatcatgacttgtaccaaaaatatcaacaatgttcatttgaaaaaaaataaataaggaaatactatatgacttaattattaataaaaaaaatagttactcatttggtcgttaaatgtattattcctttatgtccttataattaaaaatatcttctttaggtgggtttggtagagtgaaaaaaaaatgaaagaaaagaatcagagaaaaaataaattaaaatagggtggtagaagagttggatctccattaattttttaaaaaaaattcttccttttcaccttattttttctctaccaaacccacccttgttctcaacatgtactatttttaatcctctccataatattaaaacagtttaaaataatatatattgggacaaaaaaactaaatgatttgtttttatatcattattgtcacaagaacttttggactttagctaaatgatttatctaccaacacaagctgatcttaataaaaagaaaatcatttatgctatgcaactattttgatgatacaaaaatttaaatatcttattaataattccttttttttttctttatctctattttcctatcacgttatatcattaattaaattaatcacttttttttctctctcatgttaatgttatctaagaaatatttttcatgcaaaaaaggtttcactcgactcaattctgaaataaagagaactaaagtgattttttgaaaacacaatagattttttttaagaaattatgtttatgtaagtttttaatccttacctaatatgtaattttttttccatttatgcatttcagtttctattatttaggtaaatattatacttatttataatatctgttagtcaaaatgtcaaactatcacttaataagaaatctcaacatcccggattttataaaagaaaaatgatagggacacaataaaaattttgagaccaaaataaaaacacatattataaagcctaataacttatttaggggaagatgaaagattattccgtgaaaaatggtagaatgcatgcacaaagctaggagcaatgacaaaaacgtgaaaaccgattaggcataacaagattactcatagcctaaggtaattagctaatccactcaaatttatccaagaaaatttgaactaccctaagtccccacccctctcgttaagctcgaggatattaatcctatttttttaaatttcttattatattttttttataacatagcagatatttattgttaaatatccacactgatgatacaaaacatgttctcatccaaacttggccttgttcctctctttctcttttcgtgtacccgttgctaaccacgaagactttatatatatatatatatatcagaaaacgaccatgacatgacgaaaaataaaatatatcagaaaacgataaggccgaataatacgttaaagggcaaggttgaagcttgatgcttcacgttatttcgctgagtcttcaatgaaaaccgctgagctgcttaacatgatttcagttttccatcagtccatcactatctatccgaaaaagtaaatggatgattctgaaactgccaatacaatacgtagaagtaaaaggaaaaggcatttttactttataacttttttttaacgaattttatttctaaataaattaatttaccatattttatcaacttacaaattgtatcttattattttacttctaatataattatattttttatcttctactttttaattttttgataaatctaactttttttattttctgataaattttatttctaatattttatttttttgacaaattttatattcaaaatttatgtttattaatagataaatgactagtataaaattcacaattttcttaaaaattagaagtataatataccaaattaaaaagttgtgataaaattcaccaaaagttaaaaatttaagagtaaaaaatacaattaagccaaaaaaaaataataaatttttcttttgctggtgagaaaaatgatgataacttgtaaatcatgtcatatagttagtgattgcaagtggttatgtgcaacgacgtactaataactttttatgaaccaatttcctaccacccaaacatgctttgatttaacttgataagaaaatttcccatagaaacaaggaggactgtttatatatagaaggaaaatctacttcctacttatattgattctattattctaggttaaacctcaaaatggtttgtcatcatccaccttgatatggtggatgccttataatttacacctagaagtacaatcctcaactttgcaatgaaaatcaggtgaaatatgttaacatccaactgcaaatattacaaaatctttgaaagggtagtaagtagtaacttcattacatttttctagcatttggtcgttctctccacttcaacccttccttctcgatcaaaagaggcatgaaacaggaaacacattggcaagcatggatgtttatgagaagcaccttaaaactcttctgatttagagtcatcttttgtctcagacttctgggttgtatctttttccatatattcttgttcaatagtatctttaaggataaacaacctctgaattaccacagggtcagtcatctgcctggcttctctcaaatctgtttcttccttgttcagatgatatgcatcgagcatgatcttaatccacttgtgcagctcctttggggtgctgcttaatcacatcaaactcaaaggagtatatcagattaatcacacaaaaaaagatacagattagaatgaactagtgggaaaatctctcacgtgtatagagcattagggtccttggcttcgtgttcatcaccaggggtgaaagcagttgccaatgcagagaatcgctcctcgggatcaatgatgttcaacaaatgtttgagtagctttatttcttttggagtaatactccttaggctgctctttgtggccctgtacaattggtacattatatctttcacctgcacaatataaagcaaggttgatgagcacacgtgctgacatgcataatgcagtctaatcatcttttctaagcttgagcagtcaaaattaagcttccatggattctatgctagatgaacaaaggaggagggctttcagattatacagatcgatttaaaaatcagaacaatcagttcagttaggttcctttatattctatgacccctgtaacaaagattcatacttggctgcctgtcctggtatcagcattacattggaaagacttggaaacctcttaatttccacccccatgcagcattcatagacatagccaatgtatgtatagaattatattaataatagttataattataactgaaggataacgaagaagcagaagttagcattagatccttgtctattttggtttatgacaataagcaccggtggatctatatggaggctaatgggggaaattgcccccacaaagtaaattcttttagttgaatatattgaataaataatttttttgccctcataaataatagatcttgtccccacaagataattttcttaataagatgaatgtaaatagttgtaaaagataaaagagagaataaattgatactaattgtacccgctttatccttttaaattttactgtttttaattttttattaccatttttaataaagcttatataattttttgtttgagaaaatattagactattttttgcccccactgaaaaaatttctggttccaccactgacaattagtatctttcacaagagagtatgtgatttgtatgtctttctgactatgcaatataacatcaaccaacatttttattcaagtcctgtacgttaaaatgtgcagccaaaacacacgacttttttaagtagtcatgtgatcaccaattagcttataatcttgactatttatgtatggttgtatggttcaaaattaaaattccatttctcacaataataagtgttctcaccaagtcgcctcttacacatatatatcctctttcggaaacaatcctatttagaacttaatcataattaaggctcctcactcctccccaaaggtgtgatatgaggggatcaaaacctattggtattagagatgcttctatacacccacatgaggaacacattctacttgggtttatgttttataaagccttattaatattggctgggcacaaacaattagaagcttatcaaaaccatggagcatcataaaattcacacctcattcttcattgttgtagattcttttgctttagcccaagcactgcttatcaacaatatcaatgaagaatcaagttcctttgcctttgctaagcttttgatcttctgacaagcaatatcaatagaaggagaattgaggatatcatcaaatttggcctgggcagcatctaatgtctctatattctctagagtattatcgtatgcactgacagctgacaagcatctactgcccagcctggaaatccctgttcatagaatacaccaatgccaatcataagaaaaatcctacatatacaggacaggatcaaaagtttttttttttttgttcggaaggcaggatcaaaagtattaacttttttcagagtgcaaggggcgggttcactacgaaaatttttcatgttagaagactaagaataaaccatcaaagctgcttaactctattaagtttttcaccagacattttaaacatcccatatcttcttcctttataatagaagtctaactttccatctcattttaagaaaaatttcaagaatcaacagagcaattttattatgatcattttttttttcttattagaagttacaattataaatactcttaactatcaaaattcatctcaatctttctggtgattactagatatagaatcaataatcattgagttaaaatacccaaaatcaaacatttcgtctgtattccaaattaattaccatcacgatcctccaagctgtcatatgtatctgaaataagagagaggtagtggaagaactcccctgtaaaatctttacgccttcgtgcaactatggcattaatgtccattgggctatcttgtatttccatgagcagttcatagtgtccttccatttcatcatcaatctgcaatgcttactcctgatcaaacaaaaccgaggaagaagctctaaaaccaagcaagttcctagatatgaaagtaatttttgatgtacaggtttgtgccatctaacaaaagtaattaattaacaataagaataataatgctatcttgagggcgagccctggtgcagcggtaaagttgtgccttggtgacttgttggtcatgggttcgaatccggaaacaacctctttgcatatgcaagggtaagactgcttacaacatccctcccccataccttcgcatagcgaagagcctccgggcaattgggtacgaagttttttttttaatacctttttatggctcaaaatgtataaaattacagggataatagaagagtctatttcttaaatcaacattgcaatagaagagtcataaaaaaagctataaaacaatagttctattttttaaaggtttcttcacctttgattcagcaatagaagagtctatttcttaaatcaacattgcaagggggcatggttgtgaaaaacataaaaaaacgtaaagtactaccttcttcaactttctccgcaatgaaataaatttttccttcataactgggtcattctccatgtctgcccttctttggcacctattgtaaaatctatccctgtattttttccactcctctctaaatatcaggtacttcctccattcttttgatttcgttttttcattcaaaaagaaatctatcattttgtcacaaaattgtgtcatagtgtaaccctttgcaatttcaacctcatgctcctcagcttgagctgtggaagcactgcttgcctgtggacctgaaaggaatttcattttttagtgcgacacagaaaaactacccctagatattagtcagaaaaacatccggagtgagatagaaagaagatatcctaaaaagaaagatgtatagatgctcactcttattttttgtttgttagcaaggacaacataaaagtcttatctcactagctcaagttggctacatgaatcacacaatgtcattcagtttgcttaaagaccaaatctacagacacatgaaacattctaatttcttacaatttagcaacatctaattttattttcactcgaatcttttttacatatcatcttatccgaacaaggcagagttatgaataaattaataagaacaaaaaaaaaaattgaacaaaaatggtgatagttgcatctttggaaacgaaaacacattcattcgtccataactaatttcgtatctaaattcttacaagttagcacaacaggacaaatcagcaacattctaatttcttagtgccaacaatttggtaaactaaaaaaaaaaaaagaaattccagacaaatatcactgtaatttctagagagaattctgcaggtctgctctccccttcatattatactactacccaactctagtgacacccttaacacttcaaataaagaccaagacttaaactttttcataaacccatgtggaaaacacaaagaatacagcatattaagaaataaacaatgagaactgattggagaattggggggaaatgatacttactgggcagagaggtgcatagaagaatgtggggtttgaaattctgagctataagttttggtctttggctttggaaggatgggaagcagtttgaagcagtataggatggaggggttaacgggtaatttggggagagattattattgaaagggatgaaggtggtggtggtgctgctgttgaaggttgaggtccaaaccttgtagcctttcatgttaataaggttgttccttcagctcaaacaccaaagtgcctcacgaagcttcacacttgagatgacagacaacaaaagcaactttgcccgaatcttgtttatatatcaccatcatttcatcaccatatccgtttcacgaacccggcagagttgtaaataaattaaattaataagaaagattctattttatttttgtatgaccaacaagtcaccacaactttatcgctgcaccagctcgtcctcattttatatatatatatatatatatatatatatatatatatatatatatatatatatatataatttcattcatgtattaaagaacatataattattactacttaataaataaatttgaccaaactggacatccaaattgaatatgtatttactattattaaataaataaatttatatattgttattataaattacagtattgataaactaatattaataatactattagtatatttatagataatttaataattaataaatataaattagtttacattaatatacttttacagaaatataaatatattaggtatgatataaatatattaaaaagttaattggaaatatataaatacaagttttagtaactaaaatttgcaaattatatgcacaatattgatataatatttttttcaaccaagcttcttctaatatatttatatctattaaattattgatttatctattaatatactaataatgttatcaatactaattaatagtaataatatatatggataatatattttctttttatttaggagtagatatgtgtaattttttgtgtgtgttaggattaatggttctaatctcacctttaacatttattttaaaaagattatatgaagaaattgaaaaaaatatatggggtccattaaaaaattaaaatgacttatttactcttttattttagattatgtaaatatactattaggacacatgtcattacaatacacactgctttatatatatttctactttcaatccaaataatttaaaaatccactcattttctattacgattttacattgaaaaaactcaataagtagtccacctatgaaccactacttataatcatttgatatattataaaatatttaatggtttagattcaacatattataaaatttataattagtatttattgattaatcaaatataattaatccaacaattaatgaactcctttataatcccaaccaatcaagaaacttcatgttccacttcacctccaccatgcactgccagtctgattaaggcacatcatcaccaacaattatattgcactcaaaattatatttcatctataataaataactccacaatgtcataattaaatcggcaaaagcaaaatagccatgcaataatagaatccctgccctatcaaaaatcattattgccgttgttgacttcgacatttctctcaaagatgtctttgtcttccacttgcatactctcaacattgaagttgaagatcttggaatctcttcctactactctgctagagtcaaggtaggttgcagagtctccaaatccttctctatctatgatcttattgcttgtggcaccatcgttgacatctccaaaaactcctcgatgtcttcctcttcctcattcttccatcaccaacattgttcttaaactgaacatcctcttaattaaacatgttctagaacccaaaaaatgagtaaaagcacaaatcaatgaaagcaaatgttgttggaatcaagcttcataggaatctcatcacatgttattgaaatcttagatcatattctcaattcaactcatacttgatccttatagagttctcaaatcttaattgatttgttaaagaattgagacttaatttctatattagatccctacttttttagaagatctaatctagaaattaggttaaaaaaagaggatttcaaacattaaagaaccttagttctatcctagaaatcatattccatgtatttctactccaaatgtagaattaagatatgttttccaacacaaaataactcatgaaatcaagatttatcaagcccagacagatatttaggcatagaaatagaaatctaatgcattggataaaagaatagataaacaagaattacatggtttgagctcttattacatgtttaattccaacaaccatgaagtttagctactacaggccaagaagaagatgaagatccaagaagaattggtggaagataaagaatcaaccatggaagaaaaatatatagagagaggggggaggggaggagatcgtgctttagaattgcccttatcctggggcaagttcattatttgggctgaatggtcgtataacacctccattcatgccgcaacagggattactccatacaaaaccacctttgggaagaaaccaccctccatccctcaatacctcattggaacctcgaacatagatgtcgttgatgatttcttaaccagtcgcgaaatagtctttgccatgttaagaaagaagctccttaaagcttaacagactatgaagcaatttgttgatgccaatagacgagaggtacaattttaggggattgggtgctggtaaaactctgacctcgccgtcaaaccactgtcaccgacgctgcccactccaaattggcaaaatgctattacggcccattccgagttttagagaagataggcccaattgcttatcacttggagctaccccctcattcccgaatacaccctgtatttcactgctccctccttaaaccttttcaccaaaattcttctacgcacacccctgttggtaacttaccatctaagttcgtggacaatgaccctgtgattactcctctcgtgattctgaacaccaaatgggctccttctgctaatgggctcgagccgttggtcctggtccagtggcagggcttgctttcgaaagacacttaatgggagtcttggaccaagctaaaggaaaactaccaccttgaggacaaggtgcttccagatgagcaaggggatgttatgaagcaacccagcataggggagctgcaagtagacaaggaggagacaagcactaacctcagagctaaaaggaaaacgagcaagcctcactacctggatgattttgtaattaactctgaccctaagcgctaagctggcagcttctcattggataggaaagatactttgtctgccaggatcttcattctgttatcctttctattattgcacccttaggacctgttgaggaaagaataatcagcttagcatttggtgcttatatatatatgaatcaaagatgtaatagaatataaacaataataatcaaaatttaatttcctctccttaatctctctttctagaggactcctggacctcgaactttacgaacataacaattgtctcatcaaaattatgaatgagtcaatcacaaaccttcgcctcttcacttataaatagagtttatgttaaaacatgccatatcaaattaagagaatacaagttttcatttaagtgagaattcttgttgttgaattggaatttgtgtcacttaagcgataccatactattacttaagcgccccttgtgtatgctctcggatccatatccagcttaagcaagccttaacttgaaactcttcttcatggaagttttgtcgcctaagtgggattaaccatttactttagtgagagacttgtgagtcaccactctcctttgcatcttcaatccttcatgtgaaaatcatccaaaactcaataagacttcagttgtcaatgcagttagcataattctttttttttttttttttttttacaaactagcagatttaagagtccattttaaataaaaattaagataattattcacaaagtaaaagtgtgaaaaataattatcatttcatcagtaaactacgtattaatggcctcaagtagaatccacccatttcatatccattctctcttttcttctacttttttctatactccacatctttcttttcagaattttctattatccaaagaaagcattcatgagatttttttctttgagtgtggggccccatgtttctccttccaataaaccaaaaaattcattttctggctcatttatttctcatctatttctttcgcttcaaaatctatctaaacaatcacaccgttaatacacatgggttattaatttgaaaaataaattaccataaggatataaataataatattaaaaaataatgtttttcatttcatcaatgttatccacgttggtacatgggacggagactgtacccaactatatttctggggtactggaaatttcacctaaatattatttatgtacactattaataaaagtgaaaaaagaaataaaaatgaaaagaaaaagcatcattgacgactacaaaatgttatacagaagacgagttgattacttttgaagactgataaaaatgagcttgcatgcaaaatatatttacactttttttttctctcttttcttttgccgtccattgatatagtcgtcttaattcctcaattgaagagtgtcacacctcttcatcactatttttgttatgaatgtatttgctgactttgattgctagtattttatctgatttgtcaagcaagaatcacaagacagatttgtttatatatatatatatatatatatatatatatatattataatggcattgtgacaaattctaagatggaacccgattccagcgaagttaaaaattcgtcggtgtgtttggtatgacttaagatagacgaatttttttctcatgaatgacaataatgccaaatgtgttatggcattttttttggaatatgcgttcataaattataacaattctcttaaaaactttttaatgaacttcttctaaaaacaaatgaatgtatattaacaaattgtcccgagatcattaatatatacactcacttattattttagaataagtattttaaaatttataattatgattttcttaaaatgtatctaagatataacttaataatatactcttttagagttataattaaggttgttcggtggttgaaaaaagaagaagaaagattctgaatttgaatttttctcactttactctttttaaataacaagcaagtatatgtatgtataaatattacaattacattatattatatagactgtttacttggtcctaatttgtctatcttgagtcatataagtaagtgtatactcctcctctaaaaaaagtaggtgtactccaattttgactactcaactcaattatattaagtattcaagtgtacgcattaatgctaaattgataaaagagagtttagggtaactcacctagacgctgttttaattggatttaatttctttttaaaatgaggaattcattttaaagataaaataagaaatataaattgttaatgaaaatttaatagtaatattacatcaatatgtataataaatcatacatttattgaatatcaactattgattaactcattaaagagtactactttatcttaacttactttacaagaataagtgcattttagttttacacgtgttttatgacaacaaaagattaaaatctatcaaattcaaaacataattatttactagaaaataaaaaagctagtagatcatcgaccaacagtcatagatcctctttgattcaggtggaaaagattccagctaagaaaatcatacttcagtgtcatccttcaacttttattcaattgtacgttaataatggtaacttctgtatgaaaaggagaaaaatgtaataattatttaatatgaaaagaaaagatagatgttagttaaattgcaatagaaaagaaaaagagaggtttaagatgattttttaatcttttatatggaataatatagtatttttatagatgaagataattaatttaatagttatggtgagatttcattatgcatttctaaccatattttctataggattctcttatctttttcttcttctagttaacttgtgaactaagggatcaaaaatcaaatattagtaataattgaatttcttattggacaactcatatgttcatatcaatctattatgtgtctttgcatttaacatttgttagatattaagatgtctaaaatattaggatgtctaagtattaaatcttattgcattattaaatgagtaatgatatataaaaatcaatattataaatttctatttgtcattctttcttttctttttctctctatctttttataaaatcatataatctattatatctatattttatttttctctagatgtctaataggataagggtgtcaaagatatttattgttgttaaatagcatttagttaatattttccacaaaagaaagaattcgcgcgaaagtaaccaatttttgttttactaattaatagttcataaaattggtaagtccgttgtgctacagatacatacaataatgaaccatatataaatccaaaaaggtatatatggttcatagccaggctttctttactgagtattatatacattacgtatgcatgcttaatgtaattaaacgaatataatcaaccaagcgatgaagaaaacgagaagacactttcacctttcgatggaaacaacctcaaatggattcttcaatgaagacagcatggtgaatatatagctttggaagcacatcttcaccggctgcacaaagtccttttcccacatgcattcttttcccttctcttttaatacatcctcatctctccaccccttcagtttcggaggagcccttctgaataggctctactctcaacatcgatcttctcaaatagtctcatatatctgtcttcgattcttacaaataataacaataaaaaaaaaaatagtactgaacttcccacaccatagcctcaaacatgactcaagccaatggccaccgtcgtgttgatcaaacagtgattgacataaagaaaccgccggtgagcttcaccgggggtctggtgttcgagtgcctcacttacaccgttacaaagaagaagaaggttgaggagaagtggtcgaatcaagaggtggacctgctgcatgaaatcactagctatgcaccaaagggttgcatcactgcagtgatgggccctagtggcgcaggaaagtccactctcttggatggccttgctgggaggattgcgagtgggagcctcaaagggagggtctccttggatggggcaactgtgagtgcaagcttgatcaagagaacttctgcatatatcatgcaggaagataggcttttcccaatgctaactgtctatgagactttgatgtttgctgctgattttcgtcttggaccactttcacttgctgataagaagcagagggtggagaagctcattgaccagcttggcttaacggtaagggttttgcaaccaatgaaatagtcctacatgtactagattaatctgctaccaattaattgagctgtttacttattctaaactcagaaaatattataccaataagtagagtaactttaaaagaattaagtatcaatgtttttagggttttggctccttaaaattatatgcacttctctctaaagtagtatatatgaacttaatcatgtcaacagctaataaagacgtactctgatcgaaataatacatgtacatgtaaaataaattatggaattgttacattttgactatcattgtcgtgctctgtattttctgcaatgtatcttgtattttagtttactcccttctatctttattataagatataattaactaattgagcaagtaagattcagatatttgattaatttagttaaaacttaaatatgcttttaattttttaaaattaagtattattttattccttcaaatttgaaattatttttttaattctaaaaattcataaaatattttttttagtttttttaaagcatgattcaaatatagaataaaaaatttataatttttaataatttttttattgccatattttatttttaaaaatttatgattcaaatataaaataatttttttatttttaataatcaaattataacagtaaaacatacaaaaaatataaatcccgtatttcttgtttaattcacacttttcaaaagaataaaaaatatttacgaatttcacggattagaaaataactttaaatttaaaggactaaaaaaataacttgaaacataaaacatgtttaaatatttagttaataacattaaatttatttattgtaattggtattttgttttcttatcacatgatcgattaattgcttaatctctaacacatgcatgtttgtgttttggttgatcagtcatctcgaaacacctacataggagacgaaggtacaagaggaatatccggcggagagcggcggcgggtctcaatcggcgtggacatcatccacggcccatccctcctcttcctggacgagccaacctcagggctagactccaccagcgcccacagcgtgatcgagaaagtgcacgacatcgctcgcggcggcagcaccgtgatcctcaccatccaccagccctcatcaagaatccaactcctcctcgaccacctaatcatcctcgcaagagggcaactcatgttccaaggctcaccccaggacgtggcactccacctgagtcgcatgccacgcaaaatccccaaaggagagagccccatcgagcttctcattgacgtgatccaagagtatgatcagtctgaggttggagttgaggcacttgctgagttcgcacgcactggtgtcaagccacctcctttgtctggccaacaacaacactctgtgtcttctgttgctccgtcctcgcaccttagccataggtatgaggaaaattctcaggacttgtcttactcgtcgcaagtgagtagaagggtcgttgatggttttgatcacagtctcagaagttcccataacaacaacacatcaatgtcgtggagcactgggaatagtgcggcgtttttgaaattcactccttcgcggcttaagaatgatcacaagctgcagaataccgcgaggtaaatgactagagcatttattcaacattggtttacatgacaactttcattgaatagtcccttcggttttaaatataaattaaaaaaatgatttgtgctaactaaaaacttaattaattatattaattttaattaatttttttattaacttatttctcatcgaaatttaatataaaaataaaataaattattataactaatacttcaatcaaacgatgaatatttaaagataataatattaaataatataaaattagttaaatttttatatttaaaaaatatgttttttcctttttatatttgaaattggagaaagtaattgataattatcttatgagatttattaataacaagacaagtcggtgaattatctcaagtaacattaattgttatttttatttatgtttctactaaatgttattttaatttttgaatttaatattaatattattttttttcatttattttacactttattttattttgagaggaaggaagtatttttcatagaagtccaattgttaattaagcgtttaatttatgttctaaattttgttatgttcttggtatgcttaatcaatcatttgtgtttgtgtgaaacgcagaaccaatgcttcacctggatactacgcacactggagtgaaatcctcgaagccactccaacaccccgtagcagtgactacacagtgaatgagaaggactacctcgctccctcaaacgccacacaggaacaccttggagcaaagtttgcaaattcctacctaggagagatttggatccttatgcgtcgcaacttcataaacataaggcgcacccctgagctcttcctttcaagactcatggttctcaccttcatgggcatcatgatggccaccatgttcttcaagccaaaagaaactttgcaaggaatcaccaaccgcctcagcttcttcatcttcacagtgtgccttttcttcttctcctctaacgacgccgtcccggccttcatccaagaaaggttcatcttcataagggaaacctctcacaacgcctatagagcttccacttacaccattgcaggcctaatcactcacatgccctttattcttctccaagcaactgcttatgccgtcattgtttggtttgccctaaaacttagaggcccttttctttacttcttgcttgttctcttcgtttctcttctttcaaccaattcatttgttgtgtttgtgagctcagtggttccaaactacatcttgggttatgctgtagttattgccttcactgccttgttcttcttgttctgtggatacttcttgaacagcaacgacattccccattattggcgttggatgaacaaaatttcgaccatgacgtacccttatgaggggctattgatgaaccagtaccagaccaatgatacctttgggtttgggtaacttgatggtgcacggattaccggtttagatatcttgaatagtctacatattgacactgatgaacgtaagaagaggacaattgtgcttacaatgtttggttgggctgtgctatatagggttttgttttacttggtccttcgttttgcatcaaaaaaccaaaggtcgtagtgaactatatatagtatatctaagggagagtgtgagttagttaaccatttgatttgttttgcactgcaaacattgctttacgctggaggagctgttaaatatgttgcttcattgtattgtattttgcatcaagctttataattgtataataaaacttgatggactttttacctgataaattacgagtttaatttctatacacttattagtgttaaaagtgtaaatcaaggatctagagaaaagcctttcaacaaatcacagttccagtgattgaatttgttatttgcaaagaataaagggaaaaagaacttattaataaagatctgacttcattcaatggaaaaacagtgattgtgttgtaatgtgtgagtttatggcaatctgtgaacttcctaatatccaatgctgaaaatctctcttaagttggattttcagaaaacagtattttaaagtataatttacttttgatctaattagtgaatcatattccaccacccgttctaaaataagtgttgttttaagcgtcattttaagttttttttacacaaattaagaaaaattaatgaataataataataattttataaaattaaatttattaaatagatgaaaaagaataatattagaatcattaaaaaattaaaatgaaaatttaaaaaaatagatgaaaaagaataatattagagtcattaaaaaattaaaatgaaatttattagaaatattaatgaaaaaataattaatatcattttttaatatttttttaaaatacaagatttagtacagatgaaatattatataccttcatgtatataaaattttcgtcacgcctcaagtctgttatgtaatccgagccacagataaatatgaacttccaccatggggttattcgggtggaggaaaaaaattaaggaaggaaaaacaagttaagataaagagtgtgtttatagaaaagaaatggaggagcaataagaaaggaggagaagaaaatacatgaaaaatataaaattggaatttgttagttagtgaaaataagagaaaagaataaaaaaaatttagactcacaattttatttttgacaaatgtgatgaagtgagcagtggccaactgtatgtagtacacaatttatggcaattttttactattggttaaaaaaaacactactgtaaaaaattccaaagattatgaatattaattcaatttcataatcttgggatttccctgtgacgtaatacaaaaaaaattaatgttgatcaagtagatatttttttttggtgtcaatgttgagtagatatataattccaattagattgacttataagagattaatcgaatttttttttttacaaacaatgttttctattttataatcattattttggttgaggagtgattatgataaaatatttccttatatatgagaaaggtcttctaccagatatcgtgccaagtgcatgccaagtgcctcttcgacgattttattttttttagatgtcaagtttggcctatgataaatgttttggccatatgtattattagcagacaaagctaaatacagaaatatgctagtaaatccattggaagtatcaaattctctttgtcgggtataggcaagccaacttgacttcatcattatggaatgatatttaaaaacttaagccaaaatgtatgtgtatacacaatggggaaaacctttagttataccgaaaagattaaaaaattatgaaattgacttgatgattgaaaagatgaaagagaaaaagaaagtgtagattcttctattaataaaaattaataaagtaaaaactgataaaagaaaccgaaattgttaacttaataagagtttttccaagatgatttaatatatgtcatcatggatcattagcacttaaaaatataagttaactcaaaacatcacaaaattgatttccattgatttaatattcattattttaattttgtttattttaaatgatttttttaatgaaattagagtcagggattgcaaactttctcaatatgtgcttaggtaacttcaatcttatatctctagaatcttccataaacaaactccttccattcgagtaggtttaactaagtcttttttgtttattgttttttttcaaattcaacttttagttcctcaataaaagttgactggttaatgtttctaaacctttaaaaaaagtttcatttttagtctcttatacttattaaataaataaaaataatgaatttaaacttttatttataagctaagaattttttttgaaaatatttaataatcttgatcggtcaaatttttatttaattagaaactaaaaatcttaatgtaaaaaattgagtaactaattagtcatttctttaagaactaaaagcagaatttaaaaaaaagaaaagaaactgaagacttaattaattaacccatctcattaaataggatttaaccaacgtctgttttcgctaacaaattcatacagtcataagcaattgatctgaaacatttagggtagcaagagtctcatcctctttatcgatatggtaatggctggtgacctccttgagcttggtgacaggagcaccctccaaagtcccaataaagagattcctaaattctagttctagatctttattaagtatttttcattctgtattatgagattcaaatttcaaaattctttaaatattttgaaacgaagttttttttagcatgaaacatgtaaatacttctaaaattatcttttctcctttacagatcctaagatttctaaataaagcataaatttaagatatttatgcttagtataaatgttaattaggaacactctttctagcacttactcatctaaaaaaattatttccaacactctctatctctctatatagattgattgaaattatttgaaattaccaattttgatgagtgtcaagcttaattaatcataatcataactttgctagcctgatgtagttagtaggcatgatgacgactgcatcaaacttttgtgacttaaaacattaatcttcaatagattgttgaatcctttaaccagctttgaaattaccggcaatatatataatattttctatgcaacttgttactctgactaataccatataggtaacacaatttttttttctttgacactaagaacaaatttatatttgtataaacagatatgcttgaacgcatgctatgggcttgaccaaccaaaatgttatgtcaggcatatcaacatctatcctttcttcaaaccaaaagaagagaatcagaccaaaaaaacattctatcctttctgtatctacaatccttccaataatctggatttttaggcctggatagataaaattagaaagaatgagattaccgaaatagagcatcaaattagacacataaaattaacgacagttgttgatgcgagtgatactagactcgattttcttaaataagatttcaggtaggaattttgtagatgaaaaaatgtgattgaaagaaaaaaaaaattccactaaagatatctaggcagattttttaacaaatattagtcattaacaaaatctatgaatactctataccaacaacatcataaaaaaaattactagaataggaaaaacgcatttactaaactgagttataaattttaacagcctatggttgttgtaatttttttaattagtagaaaaaggaattggtcagtaccagataattaacgggtgtaacctattgaaaaatgctaattagtgccttaatgaataaaatatgtacataaagttttcattaattttttttattaatactagtatatatttattgtgatttttaataaaaaataatctattttgaattccttaaaataacttatgaagtacaaacgaatttcatatatcaattatcatttccaatatattaaatatggcactcggtttcctcaacgtgatagccactccaatccttacagcccgaggacattgttttcaaccattttctattcttttatatatttacaagactatagatatacccctgcccatattacacgtaacgtactgaacctgctacattcaccctgtgtttagttattcattagaactttatcacttgtgtttggtttcacattttagatataatttttatgtttttgatatgattttcagaattaataactattacttccacatctcgtttgattctttcattttcaataagtttccaaacacattaaacgtggataaaaatgtgagaaatcaaaaagctaagatatattgcttctccttgaacgtagatattgaatgtgaaaatttactaatgcaacacactcccaaacatgtactcaacttggagaagaggaagaataacttcaactatgagtgagactagtaagctaaaaaaaactttaaaaaaatactcatatctacattctaatttaccttcaggtatcctaccgcataaccacctgatttgatcccttgcacatcacaagaagtttaatcatgataatattatgttggatatatatatatatatatatatatatatatatatccaacaacctcaaacacaaatgggagtggatcctcatcacattttatttccacaaataattattgaaaattatgttgatgattaaggaataatgaataggctgtagtatggagtctgctttctattccttttggagtgttctttttttttttttttttaaataactattaagctatataagagattaggtaaacaattttatttaccagaaattgtgcaaaattttgatagatggatgctaatttaatttgtgaagtattttcagtctgttcacgctgaacagttaggctagtacttcaagtatgtgaaggggttacctgctcttttggggtttccttgagccacttcctcttaatacttggtttcaaaattttatctaagcaaaatattatacaaaatatgaaaaggaataattggtgtgttgacagtgctaggcatgagattgaacagtgtctgctttgaaactcttcacaattcctttatttttagttattttttgtttgaatttcccccctataacttcattacctacataaagtgaaatcagaaacatgagactctcacaataatgctcataaccattagtataaaaatgcataggtcaacattattggaaagctaagtttacaaatatataataaatatcttcaacgatacgtcactaactattgctacgtatgtatacctgaaaagttcaaatttattccaatataccactcattattttgatcatgtagcatccatggtttcaaatgagagagggaggaaggcagaagaagacgaagtactagtctgtccaattattataaatcatatcaatattaaatacacacaatcaagcaaccaccaccaccacaccatgaaaaataatgcttaacatcaataacatataaaccataaaagaaataattaaaaatggatttatactaattcaatttccttactcgtcttccatctctttcctagctactacctcctgcagtttccaggcttgaagtcaaacccctatttctcaagaatatttgttcttctaacgctccatccaattcagcacttttgcaaaatggtttcaaattcttccacaagggacaggttctcaaaattataaggttgaccaagctttctttcatttttccccataatcagagttatagggaaactcaatagtgttggagatcaaggcagagaaagaaatggaattcagaaaaaattttctggaactaggtggaagatgaagtgttagttggcatgattcaagttttacagcccaatggggtaacctctctttcagattatgatggagttaccagatatttggatattaagactggttgtggcatgtgttttttgtctgcttatatttatcagatcggcttctggctctgcaactgaaggttagtaacttaatactataatacttttagatcactatgtctatactagatttattttccaataattatagtgaaattttttaatatgaacccaaggtctactgatgatcatagttaaaatgggggaaagaaagaaacttctttgtgaggatgtggaaatagaatttgttagtttcatactgtcaatactgagaatcttaaaaccatttcacactttctcttttttgatgttgcccaatccatttttacaaaataaatataatctgtctaatttattatgtaggctttgaaaacatagcatgctgtgctgattcaaactacacagatccccaaaccaccttaaattacacaacagattacagatggttccctgataaaggaagttgcagaagaactaaagatgtgttaaatgaaaaagttcgactgttttttgtagatgaaggaaagagatgttacaacttgccaacaattaagaataaagtatatctgataaggggcacatttccattcaacggtgtaaattcttcctttaatgtctcaattggggtaacacagttaggtgcagtgagatcatccgggctccaggacttggaaattgagggaattttcagagctaccaaagactacatagacttctgcttagtgaagggggaggtggatccctttatttctcaacttgaattaaggccattgcctgaagagtatctacatgatttgcctgccagtgttttaaaactgataagcagaaatagtttttggggcacaaaagatgaaataaggtatgcgatatacttcttttgaggtaaactccacctccatttgtcaaaaaagtgtatctcctagaaatctacaaggcttagggactatcactttatgtttttttatggaagcatcatattcatacatagaatagatgttaaatataacatcaacatactaggcttagggactaacaaactaataactaacatttgctgataaaaaatatatttaggggatatataattgcaatttgtgttattctcgcttcggcatgttttagacagaatcaatttgagcagcatgatgcttgaatcctacctacaaaagcatgagataacctatgctttgcctaaaagaaagaactgtaaaatgcatggtaaagttgtgccttggtaacttgttggtcatgggttcgaatccggaaacagcctctttgcatatgcaagggtaaggctgcgtacaatatccctcccccataccttcgcatagcgaagagcctgtgggcaatgggatacgaagttttttttatctgaattaaaataacaacaaacaaagaaacaaaaagccaggattcgtgtatatatcactcaatccattataatgtgacttacaagaattactgttgccactttgttctggatatcataaatggtgcaaactgcaaaaaggatgtcaatgaggtgtatccttagtttctctttgaagtgaattgtgcttagtgtttggtctattaactttgttttgcttctctgatgccatggactatgtacatgtacacaaaggtcttataatatggctatttaccaaattttaggttcccaaccgacccaagtgatagaatctggaaagcaacttcaagttcattatctgctcttctattgtcttccaatgtcagcaattttgacctcaaatccaatgtgacaccacctctacaagtcctccaaacagctgttacccaccctgaccgattacagttcgtcctcagtggccttgacattgaggataatgaatatcgtgtatttctctacttcctagaattaaatagcactgtcaaagcaggcaaaagggtgtttgacatctatgttaatggtgagattaaaaaggagagatttgatatattggctggagggtccaactacacatacactgtcttgaatgtttcagcaaatggattacttaatctaaccttggtcaaggcctctggagctgagtttggaccccttttgaatgcttatgaggtcctgcagatgcgatcatggattgaagagaccaaccaaaaggatggtaagtctgtctgtttttgttttcctcctttgtctgggtggggttgtcacatttagttgttttacgttccatctttttattcatttctgcacttaaatttgcagtaaggatgaattttaatttgtaaccaatcttcaatctctctcttacactaacgatttttacttctttagtggaagggattcagaagattagagaagaattgctgttgcaaaaccaagacaataaagcactagagagttggactggagacccttgttttttcccctggcaaggaataacatgtgacggttcaaatggttcgtctgttatcactaagctgtaagtccttcaatccttgttaaaatactgccacaagtatatcaactaagattatggctttaatgacccaacattgattttcatgctagaaatgaaatgtgaccccaggtgaattttacccacaatgccagtgatttcaagcctagggattcaacaactctctcagatgagagtttttggagaaaagacagatttttccttcaataaacactttcttaaacatgcccttagtctcacaactatgtttatgagaatacctagtcaatgactgaaatagataatggctttaatgcatcctccatacatgctttaataaccaatcaatatctctagctaagaaggttctttagataaatcaagtcttctctttatgtgcttattccccttttcataagctgtctattataatctacatttttttccagggatctgtctgcacgaaatttcaaaggacaaattccttccagtatcactgagatgaccaacttaaaactactgtattgccttcaaagctcttgttcaaatggttctgcatttatttttggtggataaactgggacagtctgttttatgacttgatgtaattatttggttatgtgcagaaacctgagccacaacgatttcaatggttatatcccctcgtttccactgtcctccctgttgatatcaatgtaattatcccttctaatgtttagctatgactatggatgacacagtatgaattatagtacttttattatactggttaatgttatcataaacaataaacagaaccatgcaacttaattacttaatggaattgtgtgtaagcatcactgttagatagctcaaccagcatttacctgaaatttgatttagacagatggcaacaaataacatgatttaataaacaagtttggttcctagactacattctccttgaagcagcgaggaaacataattgtgtagttttacatggattgagcatcctatacacatatggacataattggattagagctagcactcaattcaaaaatccttctgatttgatgatgctctaacattcatcctatgcataactaactttatagcatcacttcagtaacaagaggtataaaatatcaatgctttaagcattatctataatattcatgtgcattctaacctttatttcttatgatactttagtaggtgcagatatgcctcagtgggcagtgtctgtaggaataatatttggaaagatatgatttaacattatcatgttatatatattgctcttatttcttccttccttctgttgattgatttaaatttaacgagcagagatttgagctacaatgatcttatgggatcacttccagaatcaatcgtctcactgccacatctaaaatcgttgtaagtatttatatgtttgcattctacttcatctataccaggaagccacttttaattatttattttttaatgtactttctacaaatttagcttgtattctattcatttataggtattttggctgcaacaaacgcatgagcaaagaggatccagcaaatttgaacagttcaccaatcaatactgagtatgatactctctctgaaatgaaacaacaaaagttttaaagcacaatttgatattttattaacattaatatttcagctatggaagatgcaaaggaaaagaacctagatttggacaagtattcgtcattggtgctattacatgtggatcacttttgattactttggccgttggaatcatttttgtttgccgctatagacaaaagttgattccatgggaaggatttggtggaaagaactacttaatggaaacaagtaggcattttgtcttctctagtccttgatatgtgtctctgcattctaaaacaatatattttcttttaaaattaacaaacaaaaatataatcacttcattctttatatacaatctcagatcataagatattaagatcaatagtcttgaaggttatcatctttattatagtacatggttttacatgcatattgaattagtttttaacttctattggcttcaaaaaacatgcaagataaaatatgaatgagcgtctgcggttctgcagaaaaattgaaggagccatacatctttaaattgcattatccttcactattttatatcaccatagcctctgttcccaacatcaattccatttttcttctattgattcgcttgtaatccatgcacataactagagcaaatttagggttaagctagcatttcagtcaggaactcactcataatattgtgtataattaagaaagtaatgaaggggaaaatctatagaaaattaacatatcttgtgcaaatttatgcataaatgacacctgagcactttgaacaactagtgacaagaacttcaaggatgtcagtgctgtcaatgtgtcatgtaggttttgttcaatctaaactgaatatatgacataattttctacaaaaacatgcagatgtaatattctctttgccaagcaaagatgatttcttaataaagtctgtatcaattcaaacattcactttggaagatatagaggtggccacagaaaggtacaaaactttgattggagaaggaggatttggttctgtttaccgtggcactctaaacgacggtcaagaagtggcagtgaaagtccggtcagccacatcaactcagggaactcgagaatttgataatgaggtacaaatacaatagacatttttagtttattagattatctaagttcccatgaaatgttcctttctaaaaaatttaggcagcaacagttatttaattagtgacaaaaggagaatatcttatattcaaaagttcccatgaaatgctcctaattaaaaaaatttaggctgcaagagtaattcaaaagctgatgtttgcatcccggcaaatgctaaagaagaatataagatactctccttttgtcactacattccaggctcttacacaccccaacccctcttcattgaaatttttaacaattgcctacttttccacctcacaccatctgaccagtctgtgatgtatcttgcagctaaacctactttctgcaatacagcatgagaacctggtgcctcttcttggttactgtaacgaaaatgatcaacaaattctcatgtatcctttcatgtccaatggttctttgcaagatagactctatggtaaacattccaaaatcctttcagcttatttgttttggtacccattaattctaaaattcaactttacaacaggggaacctgcaaagagaaaaatattagactggccaactagactgtctattgctcttggtgcggcacgaggcaagtaatatggtgcttttatttttactaagctgcagcaaatttacctaatcaacacataatcttgaatcctatcaggaaggagaataaaataagaggcacatcgatttctctaatgaattaaaaacttgagaaaatcatatgaaaagtgatgaggattaactgattgacaatgatggggaaaatcatattggtttctatatagtttatagtgtttcagatggagatatttgagggggaatactggaagaatatgataaatcacatgcacttcataatagtactttcaggcccaatgacaacactttgaacacactcttcaactattaccgcttcaatttccttcaagcaatttcttaatttttgttttaataattttttggtgttattgacactgttgagtgctgaggttaaactttcagacccaatttctgaaaatgattttattggttcatcatggatctacttggttaaaaaccgaaacatggcatgatgcatgcttaattttcttcacaagcttaacttatttgctgacctaactgtcttcattacaattttcatctataacatgttgcagaagatagaatgttaacaaattttatgattaagcaggtttggcatatcttcatacatttccaggacgttcagtaatacacagggacgtgaaatcaagcaatatacttctagatcatagcatgtgtgctaaggttgccgattttggtttctcaaaatatgctcctcaggaaggagacagtaatgtttcccttgaagtaagaggaactgcagggtacctggatcctgagtaagtgaacatcttggatcatgtctttaccagagcttctcatactgctttactcccctttgagcaaaagattattacacttcccacataaaggtttctaggaatcaattaatcatcttcaaatttgaaaaaccctaaaaaacaaaaaaatcatatgcaaaatgattgcccagacttttactacattgtttgtgtcatggaggcactgtcaatcatagagagattgatgaaatatttctgattatatttcctttatgatgtgtatatttattcataaacaaacagaagctagactgctccatatatatcagtaactacaaattacaagggataagaatctaacactcctatcctactcctatatgtttcctgtgttacagcttgtaactatgacctgaacaactttcaaaatagctgaaatttatccctgtgcaggtactacaaaacccagcaattgtctgagaagagtgatgttttcagctttggcgtggttttacttgaaattgtgagcggcagggaacctctcgacataaagaggccacggaacgagtggagcttggttgaatgggtatggtccatgcctgaaattttgtattttactggattgtactaaatcacattttgttgatgtcactaagaaataactttgcttgcattgcaggctaagccatacattagagtatcaaagatggatgaaattgtggatcctggcatcaagggaggataccatgcagaggcaatgtggagagtagtggaagtagccctgcaatgtcttgaacccttctcagcatatagaccaaacatggttgacattgtccgggagttagaggatgctctcatcatagaaaacaatgcatcagaatacatgaagtcaatagacagccttggaggatccaaccgctactctattgtcatagagaaaagggtgctgccctcaacttcatcaacagcagaatcaaccatcacaacccaagccttgtcccacccacagccaagatagtaaatgggtgaaaatggaattcttttcattcgtttttcttaacagctttagtcataatacatatcaaatagtaaaggagagaatactactcgtttttgtgattgtactttcatccactctatgcctcttgaaactaatctctcttgcttagcctcatttttatgagtaataaattgggtcaaatgcaaaaggccatatcgtttgccaagtccaaacttgactggtaaagtttgcgtaaaccagattgtgatttaatcttaagacagttcaaccgtgcattctacaaagctatagatacattggttggacttgactaattccataaagcaggacgaacacctaagtttgtaaggaatattctaagtccagcctaacaattattaagagttcctttatctctttttgtttgggtggaaataagtcaacataaatgatggtgacttgcattttctttattattattgtagaatcacgattgaaatactagagataaaattacaatcgttgtgcataaggatcttcctagatcaacggtttcttgacgaggaatgtgttgagcagaaagggcattcaaaaaacttaaatcttaacgaatttttcaagttttgggttgttccaactctaaaatggcacggaggggaaagaaaggttttatagtattttgtgaaacaacattattaaaacagatacttagagaaaacaatttcattggaaaccaatcatcctctttctttgagttgatcgcgtccctgaggcacctatttctttgatgggtactgaacacatgattgtctctattagattgcatagtttttaacgagttattatatccttattacgatatatttatataacatgcttttacaacttatttttttcaatattctttatggcattactatcttatctcaccctatctccttctctttctcccaatcgaagaaaaagttatagaaaacgtgtagtagtcaaatttctcatttttaatagataacttcaaaatgtccttatagaccaaataaatcatatttggacaaacgtcctagtgctggaatgaatggggtgggataatgtacggcaaaagacattgtcagtggcacctgatttaatcaaagtttttcctttcagtttctgacaaaaggggggggggggggggggggggggggggggaaaattttattttttccttttctaaatttgacagataattattagtgataacatagagccagtttgcacactcttcttcctccccttgccatgttatgcagcagaaatactaaaagtttgcgcaagaattcatttccaattttaaaatgcaagcttgagttccttagttacagtaaagtcacaataattttcccctccaaggaaaaaattgacctacacaatcatattgaacaactaatcaccgacacttttgcatgatcaacttcataaactatgctgtttcttacatgttgaattatgtttccttaagaacactcatattagaactagaatgagaacaaacaaaacaaaaggagggagagaagagattatgtaggggaagtgagattgagcagaaataatgcgagtcactcagaagaaaaataagtgaggcccagttgtcgtccaatggctcaaaaagaatgttgttaagaatgtgagaaaaatatgttagggatagtaataacattccttaagctgtatatggaaaatgtcaaactaaggaaaccgatattatccatttctatctagaggaagaattccatattctgccaactgagcttccttttccctagaaaatggaaggtaaaataatactctaaatcaattgatgtattctttccattactacaactaagagtctgagatgagtgatttcccagacctcaagtgattgagtctgtcatgaaagtatgtcacaaatgagaacagagagggcggcacaagaacggcgaatatgtaagctcacagcacaagtgaaaacacatgactgcattgaagggatcaagggactaagttaaaaggcatttacacacggcaaacagtgtaaaaatctgagaattgcaacaacccgtgcttatgagccataggatttcgtttctccaaagttgaaaataaagcaatgcacttaactatacatcacccaataaattgcaaaaccaagtgctagagttacaaaacaaagcatgacactaatcaaacacttcacttttgctttataaacgacttacatataaagaattccatttagattttacattataggtggagagtgcttacaacacaaaaatcatgtggcaaaaagagaagggttggccgaagcattgcccacttgaacttcaagcagctccaatctccgctccaacacatccagcttctcatttaaagacgccaacttgctcttcgtcgtagcctctgaaaaaacacgcattaaatgtcaacggggcagaataaaaattcaaactttgaggtgctttcggcgtgattcagtgtgctccagcactcagggatacccaattatgtgaaggacaaagtggtggtgttgcttcatggatagataaaacgacaccgggatgggtcgttctgcagagtgggaaaaggaaatgcgtgtgtaccgaattggacgaggaagtcgaagaggcgacgaacgttgagagaaatgtgagagatgaattcgcggttctcccaatcggcttgcactgcgattcccacgttcactgcgtttgttatccctcctgcgcgagccatttcttcttcttccacgcgtttccagatccaatgctgatgcactctgcagattagaatgcacagtttacttcccacacctctctttctcttcactgaatatatattttctgagtttaattttgacaaatgtaatttacactcttatctgaatatatcatcaccgaagataattatgtcgagtctaatatagtagaattattataaataataaagttattcttttaaatatttaaagttgtataatatgactcaaccaaatctttttattaaactataataacgtcaattagttaatccatgtgattgagacacgcatttgatgatacttataaattactttaaatattatttccaaattattttttataaaaataatctttttaactatatatgtttacattgtattcccaatgatacaaattaaacatgaaattaagttttgaatataaagactttaaaagatttttatgatattcattagttgacaggtcaactataatttttatgatattcattttggtgtgttatttaattgaaagattctactttttgacagtaaaaaatattgttcttttctttatgtggtggcaggaggttacaaagtgagttgaataatggtagtagtgactcgcttaccccacctacgaaaaggaaagcaatggaagactcgagtacgtggggttgacttcactggtgcaataccaacttacttgatagctagtgagagaaatgaagataatcctaatctaacctaaccccatctttcaattgaaggtgcaccttccattataataatgacacttttctttatattaacttttgttttaatttttaaaataaaaataaggaaaagtttttaaattcatttagcaataataattcctgctgaaataaaatgtaaagtcactcttttcttatatttgattcttgctctcgctcgtgtaatttattttttctttttccaatcaacttgaatacgggcaaggatagttataaatgctaattttcattttgtttcaccattttttctaccaaatgtaatactttaacattaaattgaaacaaaggtttcttcttggtaggatagcccacccacctagtcacccatccatccaccactacgcaagacgtgaaggaaaggaatacaagttgttagaatgtagctttcacaattatctagcaactactaattcttttaggctcgtcgattgtgttggttttttttttaatgggtagataaagtgttggtttaagtgataaaagaataaatgttaaaaagtttatcacggaacaacgaatttcaaaatttaaatatggtaaaattaagtttaaaaacgtgacataaaactatgtatgaaagtggccaactctatctatcacgaagctgcaacttgtaataggccattgtgcctaagcaatgcatctggtgttggttctctcccacggaattgcacaaaaacctgcacacagcaacattacatgttcaacacattaggtaaacataggaatgcatatattgaatttgtcttattaaaaaagtggacaaaacagattaagttgtgatgtagtgtatcttacatctagtggtggcttgccacctccaagagcaagaatggtctcccggaacttgcgccccgtttctttaacagcctgtgtacgtattaagacgtaatgatcaaaatatcaaacatgtaacaaccggtcaaggcagaacaacctaaccaaacatgggtccaggataactgacatcactcagtttcattattataatactacctactgtctttttttttttaataagaaacaagttttagtgtaaaatacactaaaacttgtttcttataaagaggatcggaggaagtaaatacttaactgtacaagaaatatttagagtgtgcaggatcattaccaaccaaggaaaaagaagccagaagggagaaaaatatgtatataggaagcatatctagtgagagtaaaacaacaagctaggataaacactgaacaaaactcagttaatttcaccgaattctgattgcatatcccatacaataatgttggataaacactactaatttaaccagtagtaactttattgaaatgtgattgttcattatgatgtcaaaattattgtgatttacaacacacatggcatacatacaacagtgccactagtctaataaataacaaattaaaaaaggagcaaacattcattttgagattccattgacatcacttcggtcatttgatgatttgaaagataagtgacatcaacttagtactccaatcatgggaagtaacattaaaacgtccattgggattaaattgatgtcaatttctttagaggaggactaggtccaatttcttcagggaccaaatgatgtcaaaccagtcttttagggaacaaaatggtagtttacacttaagagagtataggtaatatatggaacagtaaacatggaaaataggggattttgaacattaaacacaaaggcaagtccctaaacagtaccccaccacctccccaaaaaaagaaaaaaatataccttgtcattatccaatccagcatcctcaaatgcagagaaagcatcagcagacagcacctcagcccactgcataacagacacattcaccataagatataaatagttctttctccactcattggtgggacagggagagttctatacaggaaaggggagtctaccacaatcataaaagaaaaaaaaaagtggaaacatccaaaaaagatcctcaagacacaacaaacgtgaatcatcattaaagcaatgcagaatgtaccttgtaactatagtatccagccgcatatccacctaacaaatgcaaaacccagaataaataaatttagttttgttgagacactagcataattacaaagagaaacaagaggcacagcaaacctgcaaatatatggctaaagctgcaaaggaacctatcctctggtaatggaggaatcacttgggttttctcagaaactctgtggtcaacatcatagatcgactcaggtccccctggaacatattttgtatgaagttccagatctacagatgcgaattttaactgcaaattatatttatggacatagattagaaggcatcatggaaaaatagatattttaaaaacataacataatacaagaaagaaaggtcagaatcagcattaaaaactacgaacaattaacattagattgaagccttacagacaaattagttcatagctcacttaagaataacagaacccaagaaaatacctcaacgaagaaatgcaattataaatgaattttattccatcctttagaaacaaacaactacagaaagaaattatttggggtaacaaagtgtaactgttgcagattatacattttttttctttttttttgtgtggggggggggggggggaggctgacacactgtatgtatctaaaactgatagaatatggaataagggatgggagatcccctatctcagactgtttctttagactaccaaacccaagtggacaaactagttatcacgtaataaagttctgaacttgaattgaagtagttctgctttgatagtactaaacccaaaagatgccatggtgaaccagacaagaacataaatttgataagttaatgagagtaacatatgcaactttcaaataaaatccagaaaggaatagccaaccaaaacattcatactgacctgtcgaagactaagagagccagctcgaaatgtcctagcagcaacaagcttcaaatatacttcttcagggagactctccccagtttcaaaatgctttgcaatgcccattaaagtttctctatggtaacaaaaaaaaatgccgtaaatacaacatacataatgctctggttaaaaaaccataatgttactttacgaacagaagatactgatatgaaactcaccacctaatattagcagttaaaagggattaggtcactcaacaaacaagcctaagaatgcccaagtaccccataaaggtgcaatagaaagaagttgaaatgttgaatataaaagcaagaacaagcaatgctgacacaatggatagttggaaagaatcaattttccaaaacataaggcaaaagttattcagaagacattgatcaaaaagaggatcaagcatagcatataataaaatatatggtggggaataacatacaaggttctttcttcactcaggttatgacaagaggaaggatgaaaataacaacaaagtaagacaagtagaaatatttacttacctatggtaacaccagttttccatgaactgagaaggtaactcaacagcatcccactctatccctctaataccagcaaccagaccctcatcttgcttagtaagcatatgttgaagagcatgaccaaattcatggaaaacagtctcaacctgagaaaaagatagtgtaaaccataatgaatttatagataagtgcacaaattaggctaattctagtgagtaacgtattatatcagttgatattttatcaggccaaaattttaatattttttttttatgaaaaattaaatatgagcaacatgataacccaacccaaccctacctgaactattctgtttttcattgcacattaatttatgaatattttgattgcagtgtgatcaagatatagtgttattcagcagggtttcacaatgcactttagctactggtcctcccacctcaaagcagctttctaaaattagggagtgatgatatttgtagcagtttcaaatagctttgcagggcatgtatatttcctctatgggttcagtcagattcttagtgttttgaatctgctgtatacctatcctctatatgtactttagtacctctggtactcatctataatatattcctacttttgctgagcaaaaaaaaaaaaaaatagtgttattcagcttaaatagcctaggaaactcttttgtcttaacagataatgatcatagcaaaaattataaaatagacaaatacatcatgtaaaattgaggttacctcacggaatgtcattagacttggcttgtttcctactggaggagtttgattgcacaccatgtgagcaacaggcaatcttgctgaggtgccatcacgcgataatacacgactacgagcaaagacttcattcatccatgcaccttgccttttttcagcaggacgactataaggatcaaaataaaaatacgcaattggactaccagaagaatccttaacacagaagaacctgacatcattattccagacctgaataagaatacttgtgttaggaagtttaaaatagatgctcctcatacaagaatcgaatcttaacagaagggtatctagtttaccggagctagaccatcagctggctcaatttcaatgccaaaaagtgattttgcaaggttaaagagtccatccataacctttggcagagagaaaaagggacgcagttcttcctatgagatacagcagcagaagcatgagcagttaaaaggccaataaagtgtttacattaaaaaagaaagactgacacattaattaaaaataaaaaaatattgttgaacagcaggtacactagtcaatggtgtgtacaatgattagcaaaccataaactgtcattagatggtgggaggaagaaaatcttacatgtggttggcaattgacatgcgtagaaataatagctttccaaatttaaaaagtgcaattacacaaattatgaacctttcaaatatcacatttatgaaaacatgcattcattggatattttatcacagcaacaaatattttgcaggcttatgataaatttttgatactgtaccataggaaagagcattcaagtgtataaaaagtgataacaattcaacagctaacaaaatagctgtataaaaagtattgattgcatgaataattctatgcaaaaacaatgtattaaatattaaataatgtggaatggaaaataatctttcttctaatcattcaaaatttcattgttcagtgtaacagttaattaaccttgttttcttaaagtgtttttttataactaataaatgagagagagagagagagcaagatagcaacctcattaatatcatattttgactcacgtagcctctcactccaataggtaatgtcccaatgagtcaaatcaccagcttccaatgctccctgacttttggagaattccttaaggtcttcaatatctgcgaggaagaaagatgcgaaacctaagttatttcctgattataggaagacacacctatatataaaaccaaatgtaaatagacaaatacagtcacttagagcatgtgtcagacctaatatgtgttggaaattagaaatccttccaaaaggacattttttgtttctattttggaatagcctttattatgtttttagtccctgaaatttgaggtgaatttggttttagtcccccaaatttctaatccctcaaatttgaaaatatcggttttagtccttcaaatttagtaatttactgtctagggactaaaaacagttttgaaaaaatcatttcagcatctcaaatttagtgatcagagaataaagacgtattttctttcaaatttgagggactaaatgacttctgtctcttttttaatttgggggactaaaaccaaattcaccccaaatttcaaggactaaaacataattaagcatttaggataatgacaatgaaaggctaactccagaaagcttatatgcaatgcattttccccatacataatacacacacacacacaatttaaagcctgattcaaacacaaaataagcacatcttatacacaataccttgcactgcagcatcccaggaagacctgcgaagcttttcaagaagttcttctgctttatcaacagttgccattttggttgccatgctaacctgaaagatcgattatacattaggtcattagcaacctataactaaattgtattcttaatatagcatatgaatcatacctcggcatagttattgtagtttagaagcttggccttttccaaccttagctttaaaatttgatcaattattcctgtattatccaaatctccactagatgcacgtgatacatatgcacggtagatttcttcacgcaaagaacggttgcgagcatgttgcataacagcaataaaactaggagcatctaatgtaattatccatggcccattctcagcggtggcattttcatgcccctgcatttgcccattaagtaaccagaactcaacatagctgattttcataccttgagaatataataaaagtacaaaacatgtcaatatgacacaccttggatactgcactctgtgcagccaacccaagagcagtagcaggtaatccttcaatttccgtcttatcagtgattagcttttcaaacttctttgttgcatccagaacattttccccaaacttttgtgataacttttccagctcctatggatgaaatcaagacagaaaataaaaaataaacataaaagaaaagaaccattaattgaaattttgttaagttatgaagtccaatcagtttgcttctggaatttgagcacaagaaaagcattatttaatcacaaaaaaattattacttggtttaatttggagttgagatattaagaaaaatcatccactgtcatgaactgctaataaaattgggatttaaaagtgctgataaaagctaccatatatgtttttttagttgttaaaataagttaaataacacactgctcacctgttcaattttgttaaaactttctcttttatcatcttcaagagaaactccattaagaacagcctcctttatttggcctgcaaaggcaaaagtattttgttatttggtaaatgtaaaatggcgagctccaaataatacatatgtttaaaatcaagtgaacggtgaatggaactacacttcgagatttagcatggcatcatgagtatagattatagaagttcctcaacaacatgtaatacaaagtaccatggatattccatatcacaagtcaaacaccaaaaactagagcacacacaatatctctttcgcactgtgaagctcaacatcaaattgccaaatgagcagatccataaatcagaaaattttacaccaactacacacccagcaccttccatcttattaaacaaaagcctagaagctgagcagcggtgtcaggatataacccaagagcaatttcaagcaacttttagcataaaaaacatggcagtactcaaataaattcacatcacaagaacagcacaacaacaagacatcttgataacttactttcaactatacgtttgcgagcatcactaagtgtctgccaattaggagactcctgaatggctttgaacgcattataaataggtttgctttgacccagtctaagctgaaacttaactttttctgcctgcaaacaaaaaagtaatccactaatccttgttagcgcatcaaaggtgacgacctaaaacagaaacacacacaagatataccccacccccaaaaaaaaccgaaattcatggctcatgtgttataactgaagcgaaaaaaagaaattaaacccataaagcgttacactataccccaattgcacaaaaatagtaaatatactaatacaaaaacataatactgcccaccaaccaccagaataaaagaagaaaaaatgcacaaatacacaaaaaaaagcacccaatttgtttcattttatttaaaaaacaatacctgcacatcttcaatagcagaacgtagctccgaactatccttaacagccttgagatgattaaccatgccccaaactacagataactggtcaatgatcttctccaacggttccaccaactttggccacgacggttccacgctgcgttcgagttcctccaattcatgttcctaccaaaaaaacacccgtcgagcaaaccgacccccaaaccccgaatcagccacgacccatttaccgaaacccggatcagaatccaaaacgagagaaaaggaaggagcttgttattgttaccagcttgccgaggagggcgcgaatgccgggtcgcacgtgtttgggctcaacgacatcgaagggtgggaacacgaaattctgcagaagaggattgccttcgtctaatgaagacgcagccatggagggagtagaaagggaggaagaagcgcgaagaggggaagtggacttgcggagtgtgtggaggcagaaggagaaggaagaggaccagaggggacaagggtgggattttgggaattgtttgaggtgtgaaagggaacgataagtgcggtttaagagtggagggattgagctagagaaagggagagtgagggtaaggcgtgttgccattagcatgtttgctataagaagggcacccactagagatgaccgtctcattttggagaaggttctgtctctgtatagaatatttttttggccaggttcgagaaaaatctctttcgtgttgaatacttctttttatttttgttttccttttttctggtagtaattattctcacatccaaagtcaagagactaatttgagaagaacaaagtatcaattaagggataatttttctcctcacaaatgctacacttgcataatcaagaatcgaacttttgtcctatgcttaaggcactcaagttatcgtattataaagactaatcttttttattatatctaactttcattaatttttatttgtcattttaataataaagtactactatcaagtatttacatgatttagaagaagttaatttctcacaaaatgatgaattaagatttaagattcacaaatctattataaagtgtctatttgtgtcttgaatataattattttttttaaaataatattattgtaggagaaaaagtaattattaagtaaaatgttgagggcattttttttgcttttttagtatcagatgtaattttattttacagaagcaattgatggcatttttgaattttactttagacttttaagaatataagttgaacaaaagctacaagcaatgaactttaaagagttcaaatggagtaaggtatttgacaacttctagatttgagtccttactcgtctttaaggcgttgtaaatgtaaagtcttatttttttaattctagaggtttttcatgcattgaattcggacgccatcttttctctgaaatttttatcaacagagaaaataagtttgagtttccctcagatcatgatttagatttttccaacgtaaaaccagatacgcaataattttaaatactcttgtctaagttgttcatcttagctcttaagcttggatgctttgttaaatttcgaatatgctaaggtcacttgtgaagattttgtttaacgttggttcggtgtgatgattcccttgtcttgttttggttttgcaaagtctctaaaatgactagtttttccacattttcattcgtcgtagtaaagcaataatgtaacatgttgcattgggctgatagtatcactgtaaggttgtatatcaaaactgatcattgatcttagaataccctatgaggtaagagaattcgaatcagcaccgagctgaacttcatgcagtgaaagaggctgattggattaatgggagaatatcaacaattcttatcatactagctatcactccaaaggaagtagggaaaagtagtcttttaatctgcaaccacaattgcaaccgaaacattaagatttttatggtttctgaaaccatatctcgatggtaactacagccacattagtcgtattaatccgtaattttctgtagtatcaaatatcatgacatatcagtaactgcaatttcaaaaacagaaccagctagtgggtattatagaaatttggtcagtttaagcctttactgcatatatgtatgatgtatctatgcatagatcaagtttttctagactcatgcatataaaggctcctggcttattttttttttatgctatcctcttccgtgaatcaggaaaactaatcatcttgaactgcttgccaataagaccatagtgttgttacctgcctctgccacagccacggccatatagaaaaataattacttgagagatcatcaaactacaattttgatcagagtcagaagtgttaagtgcaagctttttcgtcgagtaaaagaaaaacgaattcaaaatgtcatgtgttagcttcagaagttctccacacggttaatatcagattactggtatcatttggtatatgtatctttttctattttaaaatttgaagtttcgaagggatacaaatgaattttaggatgcacacaaatgaaattgaagtgaagtctggtggactttttcattgcaccgttgtgttcaactgcctagtctcaaattaagatcaataaatttaggaaaagttaaataaattaatttatgagaaaatattagaagaaaccagaacacggcacatttggtcagtggtatgccttgaatttatatagtttaaaaggagtgcatttggcttatttgaggttaaactcagtatgatatgattttaagctttatggttatcaggtttcaaagtccaaagccattacattatcaatcactagcttgtcggatagtaatagcttcaaatgattcgaggaataaggataaataagggaatccgggtattcttcaattagcaattgcaattttccttttattgtgctgatcaagccagcttattagcataggcatggctaatcaatattattaacatccgggaaatgaaacatgatatgatttggcataaatgcatatctaatggaaaattttcctctcatttgttgtacttcatggttgctttatcaaaaccaatggttggaaattgttttgtgtactcctcaacatcatggcgaagctttgcaatctctgactgaaagtaagatgactgaattgtggccaagaagtccttcaattctgattaaaataaattcatcagcaactatattttagcttattcaagcacttagcaaccctcagcacaagttgtcattcaagtgagcacaagttgtgccattgagttggaattacaaactgtgatctatgaaatcatataatccctctaacataaaaacatatcagagacccatctccccacgaagtaaccctttgctataccataaaacctgatagccaatgtataagaacatgcatcttagtatatacacctttgtattgcatatataagaagatacatatgcctgtgttgatcccctactgtgtcatctatgaatcaaaacaaaaaactaggtccaatacaaattaatattcccacaccattcacatgaaattttacttccacatagtgacaaacaacttcagttgtcatctatgaatcaaaacaagaaaccaggtccaatagaaactttccctgtatacacatgagtaataagtgtcctcaaagtggaacacaagaagtcctcgcacataaatagagcagtaggtgtgctttgtagagctgtgattgtaccataatgatcacatgcccctttcttgtgatttcttgctctttttgcattcgtttaattatttttaccctctctttggcataatgtttttatcgaatgtttccgttactgaatggtttagaaagaaatcattcacagttctttagttaactccaccatattgttaactccaattaatcacctgaataggacaaactaacatgtgatataattaatgaacaaattaattaacatacatttaacaaagctaagaaatagagaactttgaatgagaattacccttttacagtatatggtactatgtacaaatggtaacagcctaacaggcactataggcctcaaacaaactcatagccaaagaaaataattgagaagataaagaagcatacacacacatatgtcaaactccacacaaatggaaaagaatatatcaaacaatgacagtgcagtgattctctaatatatctgggtgcatgatttcttatatactcttgtatccactacagccccagaaagagggtgagaagatggaggaacatcctcagaaggttcatgagggagagcaagaccttgtgtagatccaaaactatgtcatttcaatatgaccctgttagctactctcataacttcgatgagggttgccattttgatcatgaacctaggtcagggttgcaagatgctaggtaggattcacatcgttgattttgtgtaactgtgcttattacctgtttaggcttgaatgttagaaggacaatgaaaaggtcttttgttttgacacatggcaagttttagttactgtctggtacaaacaaattaatccttcctcaagattgtatatgcctatatggtgtatctcattcatattttgtggtaataccaaaaaaactcataggatttaatttgttagatttttttttgttattatcttttgcattaatttacaagtttttttattttgtgaagtatgaataaaaaagtaagagataagaaagcctaaaacattgtgagggaatcctgttgctcccatagacatacatgtttagttattggattatttcaagacaaattatgtatatttgaggtatttttcttaatgctcctctagagtagttctgttgttgtatactttttttactttatagctcctatgacttcatttaatgtgacataaataaagtgccaaaaaattacataattgttcatataggaatgacaaacattttaattcgtaaatgttagtttctctacagatcaagtatgatacatccaactaaaatataaaaaaacaaaaattattccataaaattggggtatatacattataatgtgatttttgttggattcaattggaatccatcactcaccaacagagagaagaaggttgagaagaattgagaggaactgaatctttattgaagtatatattctatgactccaggtgtaattctgttacacctataacaaactcaaaacagaaaacctataacaaactcaaaacagaaaaatagtatataaactgaaatgcactatatcaattaatatctatctgtgatgctatcaggtgctactagcaccatgtgactttatttgaattacccaaaatacaacacttccccttaattcaaatcttcaaaacaaatgactccaatctcttcccttagctttatgaatctgtctggtttaacagccttgattagcaggtctgctaactgatcttcagtgggacagtaaatcaatttcagaactccattattcacttgttctctgatgaaatgaaaccttgtttcgatgtgcttgctacgcccatgtgagactgggtttttagcaagactaattgctgatttattatctatcagtaatgacagtggcatctgtacttcacatttcaactcatcaagcagtgatttcaaccaaattgcttgacaagcagcaaaggaaccagatatatactctgcctcacagcttgagagagcagtaactggttgtttctttgagctccaagacacagcagctccaccaaatttgaacaagtaaccagatgtgcttctcctatctgtcttgtccccacaccaatcagcatctgagtaaccaatcaatttcatctcagcaccatcaacactacttggaaacatcacgccatactgcatagttcccttcacataccttagaaccctcttggcagccaagaaatgagatttctttggcctattcatgaatttactcagcacgcctacggcataacagatatctggtctgctattgcagaggtatctcagtgagcctaccaactgtttgtaaccagttggatcaacaccttcttcctcaggcttgtcttcaagcttctggtttgtttctgccggtgtgattgcaacattgcaatcctccatcccaaatctctgcagaatttcaccagcatatttcctttgatgcatgacaatcccatattcagtccacaagaattctaacccaaggaaatatgacaatttccctaagttagtcatttcaaattcactcatcatgagtgaagtgaaattatcaatctctgttgtatgattaccagtcactagtaaatcatcaacgtataggcacaccattaacaccttgttatcctccttcaacatgacataaactccatgttctaccacacaccttttgaagccaagttgagcaagatatgcatcaattctcctattccatgctcttggtgcttgtttgagcccatagagcgccttgttcaacttgtataccatttcctccttgccttctaactcaaagccaggaggttgagtcacaaacacagtttcttctagtgccccattcaaaaatgcagattttacatcaagatgtgtcaaactccaccccttattgcttgctagagagacaatcactctcacagtttcgtgccttgcaactggtgcaaagatctctgtataatcaactccttgtttctgcaagaaacctctagccacaagcctagccttgtgcttcacaattctgccctcaggatccaatttcaacttgaatacccattttacacttattggtttcttgttcttaggcaattgaacaagatcccaagtatggttcctttcaattgatctcaactcatcttccattgctgctctccactcactaatcttcaatgcttcagtgaagttgactggctctgcatctgctaagagagcgaagtgaatcaagtcaccttcgtcagtcacaacactatctggcagcacctcacaatcttgcagtctccttggtaattgtttctgcctctgtggtctcactgctggagtagcgggcacatcgtgtactacatcaccaggcacatcatcattaggtgctacaacaccattcacaccatcattattcacttctgcagcactgtgatcatcactctcactgtcactgcatatatcgatttctggtgcagccttgaatttcacttcccctatctcccagtcccatgactcatcttctttgatcaagagatctctactaatacacgtcttcttcaacttgggattgtacaacttgtaaccaccagttgagtggtatccaatcaataccatgacttcactcttgtcttgcaacttagttctcttaacgtctggtatatgattgtaacacaaagatccaaacacccttagatgactcactgagggcttcttgccactccatacctccataggtaccttcaacttcaagctctttgtaggacacctattgagaatgtaagctgatgttgttacagcttcaccccaaaactcatgaggcatgttcttttgtttcaacatgctccttgccatatcaagcaaggtcctattccttctttcagcaagtccattgtgttgtggtgtgtatgggggagtgacctcatggacaacaccttgagcttcacaaaattcctcaaatgcttttgaggtgtattcacctccaccatctgttctcaatatttttaatttctggccactctgtgtttttgccacagctttgaatttcttgaacacctctaatgcttcactcttctgcttgatgacatacagccatatcattctagtaaactcatcaatgaaagtaataaagtatttattacctccaagtgttggcacttcaataggaccacaaatgtcagaactcactgcatgtagtggagagcttgctctcataggtgactgaccagcaaatggcaatctggtttgcttgcctttcaagcacacatcacaggtcttgtcacacacaccaatctttggcatacctgtcactagctccttctcactcaactgagttagactcttgaaattcaagtgtccaaatctcctatgccatagccagctctgtgattcagtcactgtactcaatactttcacaccagaatcttttacattgcatttaaaagtcctgttcctgctcagttttgacttcaaaaccagtttatcagaattatcaaacagctgcagcactgcatctctcatagttactgagtaacctttctccaataattggcctacactcatcaaattactcttcatgccaggcacataccacacattttcaatcaagacagttccaccatccttcaattttaccagcacatctcccattccttcagcaaccaagtactcatcatcagcacacctgattctactttctttgctggaatcatagttaatcaaccactgcctattcccagttagatggttagaacaacctgtgtccaaataccaccaatctactactacgccttcatcattggttgtcaccattaacataacaggttctgtatcagaactatcttgagcaagattagcttgctctgtacctttctctggtttcttccacttaccagcaccagaccaacattcatcagcaaagtgaccaaatctgtcacaattataacactgtattttccttttatcaaagttctttttcttattaaactttgagttataacctcctttatttgatgattctgccttatcagccagtgattttcctttatccttatcactactattaggattctgtttagccttcttatctaaccactgtttcttcttaatttcacgccaattttccttagatgctgcttgcaaagcctgatctgtttcttttccatttcctctttcaattactcttaattcaagtgcttctaaactaccttgcaattcatcaatcttcattgtactagtgtccttagactgttctatagcaacaactatatgatcaaattgagcagttaaggaacgcagtaccttttcaacaatcatctgctcagaaattgtctcaccacaggtcttcatttcgttcgtaacagtaattatgcgagacacataatcagctaccttctcattgtgcttcatattcaggttctcatactgcttcctcagtgattgaagcttgactttcttcacagttgcatcaccaccatagcaacgcacaagcgtgtcccaagcagctttcgccgtcgtcgattccgcaatcttctcaaagatctttgcatcaacacactggtgaatgtagaacaaggctttctgatccttcttcttcttttcgcgatgcaaattcctctgcgcttccgtcgcattttccgccaaatccggaactccgtcattcacaaattcgagcacatcttgtgctccgaacaacacacgcatctgtattgaccaacgactccagttcttaccatcaaacactggtaagtgagtgttaaatccactgtttccattcatcttctcactctgttcttcactcaaatgaacctcacaattctctcgtgtttccctgaccctagaaaatcaattgtgattttcttcgatttcaatctttaattcaatgcgaatttccgatttgaatcacacgcaccttacgcagctctcgtgtttcccagaatctcactcgctctagataccaatttgttggattcaattggaatccatcactcaccaacagagagaagaaggttgagaagaattgagaggaactgaatctttattgatgaataaaattgattcaagttacagctcattttctgaagtatatattctatgactccaggtgtaattctgttacacctataacaaactcaaaacagaaaacctataacaaactcaaaacagaaaaatagtatataaactgaaatgcactatatcaattaatatctatctgtgatgctatcaggtgctactagcaccatgtgactttatttgaattacccaaaatacaacaattttacacaatataaaacatatttaagataaatgtttcttgatttcttatttccaaaaaacaaattaataatttcacaattattaagatacaaaaagtttccaaataaaaaaatactaaattaattaatcttatacactctgtttctttcttgcatcgtacttgtcaaaatttagtacattagtaaaacaggccatgaaagtagtcctataatcctatccacgaacaatcaccatttcttggtctcaaagtggtcctttgaatatgtaagttgataggatgagtcaaaaatgcttgtaacaaatgttaccaccaaagctttgtaatgtttttctctgtcgagtgaggacattttaccaacttatatgttactttgtgaaggatctcaacgaagaatccgacacatgatctcattctcatggtacacatataaaatggtgttgttcgttcaatgtgtatattcccctccagttccctgtctctgaacccaaatcaataaataaagagctaaacaattatttgattgttaaatattacatatttttaaacaattgaaaatcagttttttgtgttttttttaattatccaacatgtttaagaaaactaaaattagaatatttttttgggtcaaactaaaattagaatgaagttattttttttatagacaattagactgaagtttaatgtttcccacaactcgaatagcaaaaggaaaattcaagttgggctaaacccgtatctacagcgatatgcgctcacatgggcctttgcctgggaaaatgcttgtagcgttaaaaaaataaatagaagagagttgctattggcctctaccatgggacggatttcgtaccccattgcctagaggctcttcgctatgcgaaggtatgagggagggatgttgtacgcagtcttacccttgcatatgcaaagaggctgtttccggattcgaacccatgaccaacaagtcaccaaggcacaactttaccgctgcaccagggctcgccctctttcattatatattatacaaggaaatctcaattccgttatttttttatagtactcccttaaaacaataaaattgtagttccgttgcattacttggggtgagaaaaaataacaacggaatcatgatctattgtactatttttttaaaaaaaaatttaaaaaaatacatttgatgtttctattgactaaacattgcaacattataataattggttgagcgcactactttttatgatatgtattaattgaacactactttttttatacacttaccaaccatattcacaatctaaaccattaattttatcggtgcgatctcaacctttgttatggcccaagaaagaatagtagatcatttaatataaatgaaaatagaagtttgatgcaactcaacaccttctactattgtgtattttgatattcaccatattacaaaaaaaatgaagagtttatctactattgtgtagtttgatagtgacataattttatcatctaaaggatattgttttaatgttcttgtgttgtttgtctaggcatacaatgaaattgtgatttcattgtgttattttccaaacacacaagatattcaaaacccaaaaaaataaataacagaatcatgatttcgttatgataaaatacataatcgaatcatgatttttcattacttagttttattaaaaaaaacaataaaatcttgattatgttatgtgttttattacaaggaaattattgcaaagggacactaaaggagagaacggaggagaaggaaaggtttttggaagaggatcttgtatgttttgggggagacaggaggtggggaggggaaggaggaggggaagagggagggaagaggtgacaagggccaatagtaacatccaaaaaagaaaagtcacgggaaggaaaatgcttgtaatgcaccaaaagaaaagaaaaataaaatatcattaaaatgatgatttgaaatttggaaattgactacaaaatactattaataatttaggataaaatatgatgttaatcctctgattttgataaaaaaaaaaattgatgttagtatatgcactttaactttaatcaatttggatttcaatttttgaaaagtagtaatttttgttcctcattacagatagtttttatttttaacatgaggaggaacttaaatcactaatttttataaaattaaggatcaaattgattaaagttgaaattcaaagaataaaattaagttttaccgcaattatgaacacatattttaccctaaaattaaatatcacacctttaaagtttaatacttattactaaaaattttatgtcccctaataaaactagtatgttaacatcagagaaataagacatggtatgattgacataaatgcatacctaatggaaaatttgttttctcatttgttgtatttcatggttgctttatcaaaaccaatggttggaaattgtttcgcgtaatcctcaacttcatggcgaagctttgccatctctgactcaaagtaagaagaagactgaattgtggccaagatgctgttcgttgaatgagtatattccccttcaatcccttgtctctgcacccaaatcaataaaaaacgagctaaacaattagttgattgttgaagttaaatatttttaagcaatcgacaatccctttgttgtcttttttttataattatttgattaattacttagctagtgacctctttaagaagactaaaattaaaatttatttttatggtcaaactaaaattagaatgaaattttatgtttcctaaaactaacagaataaaaagaagaaaaaaattagcacatagcccagtcaagatgggctaaacccatgatcagagagatatgcactcaaacgggcatttacccggaaaatggatacagagcgtaagagcacaaaatagagaaatttttttaaaaaaatcgctagaaggagggcttgaacctccgaccttgtggttaacagccacacgctctaaccaactgagctattccagcttacaagaaaattgtctatttttattataataacaaatacttagtacataaacatagaagtcctagctactttttcccttcttgatctccatgcaatatttattggacacagcgaatctttgtctaattggattcatccaattgtggctaaataaatttgcctttattcttcttttttggggtctaaatttgtcttcattctgtcagcagttaaaaaatatacaattttatacaaatttgcaaaatgttttatatttcatctacagccacttttccactaaagaaaaaaaaaataagaactctccttttttttttctggtgtaaaaagatactttgtaaacatataatagtccaagtataaagttcatgactttaaacactaaatatttaacttagaaaactcatgaaccagatttatagttcactaattaacttagccagtaatcctcatagacctttggaggcatgtgataaggaaagtcatcataatacatatgtgctgtagcctgtgcttgggtccctcatgtacaactcacatcatagccatctcttacacacacaatatgtatagctaggcatataattttttcaaatgcgtgatgatacgtatattctggatcatatgcttaattgattttggttaattattatcactattcattttacagggtcagcacactagttcttgataggcatttatggttacggatgcagtgatcaagcaatccccacagtaaaattttcaccaccgaggagccaagcctatgaattaatggaaaagaatatatttaataaatcacattatacttttttattttaaaaatgatttaaaataaagaaaaaccagatacaatgctttcaattttatttcatttaaaacgtcctttcaatatagaggatatagaatgtaatgatcatttatttagtcctttacattccactatatataaaatatgtaaataataaaatgataactttgttttacttcatctcatctcattttatgtctaattttataacttatgaatggccactggaaacaaacaaggctaggggatagggatttattattcactaggtgcgtgcgtgcatgtgggctcacaatctttctgttcccatcttctgctccacaatcaacatgtgcacaagattcttatcccccagataagccttattatgtttgtgtacgttggtcatgacaagaaatacacacacaaattcaaatttaaagcaccgaggctagaaatctcattttccttacttgctagttcacaagaccactgaaaaatcggtttagtgtttatgatgacaatggacttgagtaattggaatgagtagtactgtagaaatctaaaactatgtaacactattgtataaataaaataaactaataattcggctaatacaaataatatcattaatttaagatttccttgtctatacttgtgttgatttttcgtttttggtttctattgttagtttttgactgtgttaatctgctactaaatggagacataaagaactaaatgataaaaatatttctgtttagatattaaaatataaattttttagatatagattttttttttaaaacaaaggccagctgaagcaagaatagcgctaaacatcccaactatgtaacactattgtataccagtataggtttttattagatatagagattaaagcgaaaagttgacataagtataccagtataggaattaaataattaattaaaccttagttcatatttacattggtcaatcactcaactctagttaaaaccctgtctaactgatgcaagataaacaattgcttggatgagaattaagatgtgaaaggaatccagcaataggtgaaacaaggcaagctagcaaccatgaaatggcaccaaaaccaaggaaggtgctgaaattttttatagctaacgacactatcctctgcttcatcaccacttggtgaattagagagacacgaaagattcccaagtccccacacacaaatactacagcggtaggtgaggcttgtggagctgtgatgtgtaccaaaattttcacatgcccccacccattcttatggttttgttactcttttagtttttgccatcgttcaattttttttaccctcttttgacttgatgtttttttctttaatatttccgttattgaatggtttagaaagaaattattccacggaatggcttggctcatattgtgtctttttcctttccccttttactcaaatagtccaggccagtcagaaagggctggtgcatgtcctcatcaatctcattttggctaacattgattcgatatttaaaggctttggtttatcctttgtcgatgacatgaagttgtatttctaaattctaatttgtataatgcaatatctgtcgaccccaaaatatatttccaacactaataactttattgggagcaactaaaggcaccaagaagtaaaactcaaggttttaaattgcaattacaatttcatcacgattgttgatattgcgagaaattgcgaatgaataaatgtggttgatgcaatcttgtagcagttggggagtcctcaaaaaccttgacatttgcagttaaattttaaaatcgtgttaaaactattatccatctttattggcagttgttttttttaagtaaaactaatttatctttctctttctctaaaaaaacacaacgaactaagaaatatagtataataagtttaataactatgtttctttttgtcaaactaataattgataataatatgatggcttgctaataataattcaattcaattgattttcagatttgcctctataccttacaccgattgttcttttgtcacttacagatgtctatttttctaatccatattgttaactccaattaatcacaatgaataggacaaactaacatgtaatataattaatgaacaaattaaattaatacacatttaacaaagctgagaagtagagaactatgaatgagaattacccttttacatgcatatggtactatttacaaatggtaacagcctaacaggcactataggctcctcaaaccaactcatagcaaaagaaaataattgagaagataaagaagcatcaagcatacacacacaaccacctcaaaaagaagaagaacatgtcaaactccacacaaatggaaaaggatctcacaatgacagtgcagcgatcctcttacttccccaggtgcatgatgtccccttcgtgcttgccaatccacaacgagtacgagtactcgcgaatccactacaaccccagaaagagggtgagaaggtggaggaacatcctcagaaggttcatgagggagagcaagaccttgtgtagatccaaacctatgtcatttcaatatgatcctgttagctactcccagaacttcgatgagggctgccatcttgatgaacctaggccagggttgcaagatgttaagtgggattcacatcattgattttgtgtaactgtggttattacatgtttaggcttgaatgtaagaaggacaatgaaatagccttttatttttgacacatgggaggttttagttactgtatggtacaactacaaagaaattaattcttctttaagtttgtatatggtgtatctcattcatactttttcgtaataccaaagttctgttaattgaaaattaatgtctttttgtatatatggtggatctaccagtagtactgatgtagtgatgccatttacttttcttactttactgtgcaatcttttgattgctgcaattctgtttgtgttaatgtgtagtgctgctgtgttctattggttggattctcaaatgaaaaattgaagcagtgcttggttaccaatgttttatcactttctagtcagtgaactagatcaagcctagcctgactcatacataaataagaacccccccaatcatatttttctgtgagaaaaaagaataattgaattttgtttggattataaagagaagaatgcagattctgggggtgcagttaaatcctctctagcacaggaatatgatgtatggttgatatatttatgacttctaaaagtcactgcacccttaactgaaaatgaaattgttttaaaatgtataatgtataatacctttgcaaaattgtaatgaggttagcatgttagcttgtttgttatttatttatttttattttgatggggtgtgtagttgtggggtatataccctcaatttatttatatatacaaaaaaaacatgttagtggcatctggaattattgtttacaaaacctgcattttgtttctaactttttttattttttgggaagcatagctacactacacttcttgagtcgttcttgttattctaccgcataaagggacacttattccacgaactagatgctgatatgaaattagaagcggatccgaaagtagaacgtcaagaaatcgtgcttgcatcatgcaggaaaaaatgaaaaatgaaaaaaaggaatatgacggccacctaaccattttttctgttttaatttcttttcaccacatgttttcgttaaatgataaaatttttaaaatcttgttaaaatatatacgaaacgagtaaatagtttttctgaactatatttattaggtacattttcgaaatcattacttaattcataaatatgtaaatcatgtgataaatgtgatagaatacgagtataagattaagtcccacatcgaataaattaaaaataaaaaaattaagcacaatgagaagaaaattgtaaacttaagttttaagattttgagttaaagggtgatgtcaaatatctttgtgttttcatgatatttagtaaactactaaaaagttcataaaatatttgaagatttttaattagatctttaaacttgtttttatttttttaatcaagtcattattgttaatttttcttagaaatagacgaattgatccaattaaaaacaaatactgggacttgaaaaaaataattcaaaatctaattaaaaattatcaaactcaaaggcgtttagattaatttaattaaccttgaaataactaaagaaacttcagcatttggagttccaatttgacaaccactgcgaaattctaccaatatcaaagataacctatttggtattgacatgttccatggttaaaaccgtttgcacttgactttcaaaaacttcaaaagtacccaaataagatttttagtatccaaagaaatttattgaatgatgtcaaaaagtatgtattaaattcttttcatacccaatttagatttgagtaacccatgttaagtatcagactttttagtaagtaccctgcctgccatgtgttatctatcttacacaaattgtcatatgtcgttagaacaactatcttaatagagttaataataaggactgctttcactttgttttaaaaatagaagtacatgaataactttttttaagtcaataaatattgatttaattgataaaaatcatactcatatcttataattgaatttaaatttcgttgtggatatgagaattttgttaagatggatttgtaaatatttatgtcagcgcttaataacctttatgggtatatctccactcagatgagttcatgagatcaaactcacctaaatttttcattaaaaaaactcattttttttcaaataaatagggatcaatattaaattttaattataatttacaataattaaaacattaataatcaaaaataagatgcttcacatgtgacacattttatgggccatgcctgtcacatagttattagtcatcttaacaaagaagattattaaagttaacattaaggactgatttcattgcattattttaaaaaaaatcactatttttaaaatataaaaagactgattgattttaggtggagccaaaaacacattttatccatatgtagcacatgcattcacagttcattgccatgacaattgtccgaaccagaactggaaaaacggtctaaagtggactcttccaagttccaagttccaagttccaagtttcaagtttcatatatgtacttggacttatttaaaaaatggtaaggaaaaagtcctgaatacacgacttatccaatagtgagtgaatctcaatctctcactactttctaatagttatgaaacactgactggcataaaccaagatataggtaacgtattaatcacttgccgacaattagaagctaacgtgttaatttgggtggaatagactttgatgactagtgtaggtagcaacgtatctgacttgagttgggccactttttcaatgattgattaattaactagaagtgattctgaggatttgtttaaatttttttaaaaataattttaaaatacatactttttatctgagtacttttttatgaagaaaataagatttgtttgttaaaataaataaaaaattatttttttaactaaaaataatttagataaatacattaaaaaaataaaaacttcttattttattcaaataaatacttattttaacaaataagtttctggcccacgatattttgttctcttcccttcactgtcaagtaccatcaattatcaataacagccacttcttcttcttcacccttctttgcttgtgtattcaacaatcaacttgccctgtgcttcggtgcagagaggtattattttatatatagcgatcacaaccacaatttaaaatcatgactctaacatgcgctaactgttgtgtgaagctacaaaaagtaacggttgcatttgcatataagagtatttattgcgtgagtaaccgtgtaatcagtgttactagtgtaaatgaaatactaatgaacttttacacagagcataggtattttccatgcgagataatttcactcttgaatcaggtaggattacttatgactggcaaaactctctttccagaagacttaaacttgagattactagttaagttggaatattttcatagcaattgatttacactaattgatccacgtgattggtggtaaaatactatttgacttaacatgagaattttacactttttcttaaaaaataaaaaggactgaacaaaaactggtagaatcaccttcatagttgcaaacgctttgctggttttaatatccaaggggttccctacaggcagatattgaaaatagttgcttctagagctgacacaggatttaaaattttctacattaaccttagcaacgctttgtttttaattgtgtttttgtatggttaacatagaaggatattttctatggtcatgtaccatgatgaatgaaccaatttgggcacgtcttgtgctttgaactggttttattaatgatattttgtttttttccttttaaaaaaaataagaatgtgttggatatacctcatgtagtttatagtttatgtccaaggaatagttgttacagaaggaaaattttatgtccatggcccatgctgtgttattcaagatttttttccatatgcagttttacaggcagatgtcattttactgattagattttataaaaccaatacaatatcaggaagtgtgcattgttctctgctgggattctctgagtgaagtgagtaatattcatccccaagaactctacacttctttggatgtgtatgattattatgctgcaatatcattatgactttcttttccaaatgtaatactaaaatattagccaaattagacttgaccttcattttgtggctgtgtccgatgtctcacaaacttcttgttcaggctggcatagctgaagttggaccaattcttgtggattccctcctgcagcatgcataccatatgaaagtggaacaaatgcatttctgcttgttgtggccatatctgttgtaccaaagacctgggacatcaagcctcattgttaagcaatctgtgctttctattattgcacttcatggcctaagtgaatataagtctcttgtaatttttggggatgccatacatgaatattaactaattaatctgggctaattttttgcatagttgtgtgtgttcttggtgaatgagatttaccttcttgtaaagttccacattttcctgaaagatcaggttcccctgtatgtgaaaaagaaaaggccagtcagtgttataaaatttgatagaggaaaattagcaaaggttattgctcaagaagacctttcggttcagctcttggatttcatcttttagaatttgttcctgcagaatttgattaaacttgttagttgctttgtagtgttcagcttggtcattaatgggattaatcaatcaagcacatttatttccattccttctcagtgtgaatctaaaaggcacttgacctttttcatacggacaccttggagattcagttccagttgattctctagatcttgtaggtttctcacactcagaccatatagctgttctcccatcaattgcctgcgtcctcaaaatgttagtgatcttatgcatagagcctaatgagatacagaatccattctctttatgtagttaccattatttgcttaaagggatttttttttcttttcattttactgttttggagtgtgttgcatggtgtattagactagtgtttgattgatgcggagctccatggtagaatttttattctattgaattgtttagataatattgggattgatatgtgatgttttcctttcctttttctttatttaattcagagaaaaaaagtaaagaaggaagaagagtcatcacttctaccaaaaccttctttatggatggtacctgttgggacatagtattaatgtttcttgtaagtagtctaagatggagataaaagtgaatgctgcttctgcatggactatttttcatgctattctggaaaagaaaaaaaaactacttgtgtgagtaatttagagcaaggcagtattttctgtaaaattcaaatatttaagtctacgtttcttccaagtaggttatgcaagatgatgttttatgttgtagaagagtctgtatttttatatcttgggattttcttgtgaaccatagactcagatacagtactagaggatttcaacctgcaggtccacacttctataattcaatctcacttctataaatttcactcatatattattagtatagaagtaatattctgttgtatgtctttccttttactatttgtatttactttttgaaaaaaaaaattaggtttcccttttatatttgatatacttatgttgatataattgttgggtaacaaacactggtggatacttattggtagtgtatgacactaaccattgtattttctttcggcttaaacgtttttttagttcatgtaagttaatatttttttttataatttttttaagtttattttttttaattttagtccttgaaaatttatattttttcaatatcgagctttataagatgtttttcatttttagtttatataagtttcttttttttttcaattttgatttttataagaacgaacttatgaaactataaatgaaaattagaatcttataaagatcaagtttgaaaaaacataaatttatatgattaaaaataaataaaatatcttatagaaactaaaattaaaaaagtataaacttatccgaattaaaattagaaaataaacttacaaaaaccaaaaataaaaaaatattaacttaaaccaaaaatatatttaagtcttatttttctattgcaagagcacttaaatatgaaaggagtatgataattgtttaatatttaggatggatttggttttgcttcatggtttctttatctaatttttagtttttctgcaaattcaattggaggattatttctgtcagcaagaattaggatgctatttctaatgatttgagacggaatggaatttgcacttcatggacattttgttggattgaatgcagcatgttatgacacagccagtcaactatagtacggtaatatcttcttgtctgacactgaagtgcttctcaaacagtacctgttttatttactttttgtagaataataaaaagaatttgctgaataaattaaaatttagcagaaatgttgtaccgatggttttcttgtagattctgtagttgctgccttagaatttctgcctccctctgccaaaactagcaattatcaagtaaaatgatgtgagcaataagtaatacagaggaaaaagaaatgcaaagggacttttttttttcttatcattttgacttagatcctaatcgaatgctttaacacgacccacagtaggatatgagatcattacgttgtatttaggtgcagattgtcatatttataataagtatatccagatgcagtttttttatattagaattatagagccagtatgctgtttccatttagaaacaaatatagtcactatagagaatagtatagattattctctttctatcttttttcatttctccaactttcatctctttttatttatctctaccaaacacattgtaaaagtttgacaggtgctgcatttatagtcaaatcaaagttcaaatccctaagaaataaagttgttgtcttaaatagagaaaagtgggacagtaatatccactccaggaaaaacacaaaattcctaatcttgcatggttacacaaaattaacaatcatagttagcataaaaaaataaaaatctaattccagcataaaactttaaaaagttttgtcattcattaactccctttaggtcgttgtggtggtattcatttccttttttcccttagcatttgaaagggagtaagggatggatgtccttctaaaccttcctctgtttcagattctgtctccaatccatcctcacccacctcttctcctttcatcccaaacaggttcttaaggaccattttagaaaataaatagtttcaatagagttaaatgctagcaacttgtgtttcccttttatatatgattaatttcatgtgatgagatttatataattaatattgaagatatgtaagtaaattcattaggtttaaaactttggatttgcaattaatatcagtaaccaaaataaggggcgatagttcagcattgtgactcaacaaaaataaactttaataatacaagttgttattatgtatgccatatctactcataaatattatagattactgagaatactgtttggcttaatgcttgaatatattctagcaatactattcggtcaaaagaagcaaacttttctcttcttctaaatagagttatgctcatatattgtagtttataactccatcaaaacaatagtttgtttgatttggctaattaggattccacaatatcaattatgacaaaaaaatgcgattgttaaccctgattaaagttggatcttaagttaggaggaatcatgctcgattcttgcttacatttgtctaacacgagcagtttatatgttacattctgctgctattttgaaattgtaagatatgaatgagatatttgtaagatatgaatgacatgatagaaatgcaaacacttaattcttgatgattctggaggacatgtatgcattgtagcccctggagtcaatagtggacaaaaaatatgttggaagtcgtgttaattttactggttacacagtttataaaatttgtgttgtacaattcaggaccaataacataagtgaatttaacattacactttaatccacatatatgatacttaacttttttatttttacacgacgcgagacttctttttatacttgtactccaacatatataatatttgtcatattggacataaccacatgcttaatgatactatcaaaatagatgcatgagtaagtgcaacaacaaaaaataaatcatgatggatggacttcaagtacattttgcttatagcggttatttatggctgaaaaaagacaagggacaattctgaagagtggttaacagtaacatactttgacttcagattctggattcatctgacggtgatgttcttccttgcacgtgttatatctctcgatgattgatttcatgctgggaacataaaaaagtctttacatttatttgttttaatttatgaattaagaattcaattgatcaagaaaagctgtatctagaaaagacacagtgaaaacacacagcacatcacacaaccaaaagatatagtatttatgatcaatagattggtttccatgagaaaatgtaaaataaggtaataaaggtcatgtgtactgccatccaaattaagactaactatttagacaaccttattgataacagattcattacattataaaatcattgttgcaaatttatagctctccattatgtactaatcatgttcctagttttactagtgtcgcattgctggctccaattcaatgttcgtgtagttctacttgcatgtggttaatatactttttttatccgcttgttttaccctttgatagggtggacatcaaatcaaccttactcatcaggctatattatggattctgatacatttgtgaagaaccagttgttaaacccctcgtctatgaacttcgatggctcaatttattaacaaaataagaaagcatgagaaagataagcgtattgaagaaagatgatcagctgcggtgtcgtattattcaggaatgatgaaagtttatatacacgtgatgaagggtttgttacaactgaaaaataaccatcctaactaacttcttcttaacaaacttaactaatctaactgatactgttaagagcccccctcaagctgggaatgaatattcatcattcccagcttggtacaaagatggtgaaaaacagctggtgttaggggcttagtgaatatatccgcgagttgtaaggacgaagcaacaggaagaagcttgataagacccgagtgaagcttttgtcgtacgagatggcaatctatctcaatgtgtttggtccgttcatggaagacaggatttgtggcgatttgaattgcagactgattgtcgcaatacaaagcagttggttgagtaaagatgacctgaaaatcgtggagcaggaaagttaaccactgtagttcgcaggtggtggaggcgagagctcgatactcagcttcggaggagcttcttgatacggtggattgctttttagattgccaagagacaagggaagaaccaagataaactaagtatcctgtagtggatttccttgaatccttgcacccggcccaatcggagtcactaaacgcccgaagttgaggagtacctgtggcggggaagaatagtccggaacccggcgtgccttttagatatcgaagaacacgaaaggcggcttgaaggtgggtgtcggtgggagcagccatatattggctgagttgctggactgcgtacgtgatgtcaggtcgcgtattcgtaaggtatatgagcttgcctatcaatcttctgtaggtggaagaagaatctgttgaaagaaggttgccggaatttgcttgtaacttagttgagtagtccataggtgtcgagttaggcttgcaacccaacatccctgaatcattcaaaagatccaaggtgtatttacgttgacacaggtgaattcctttagaggttcgggcgatttcgagaccaagaaagaactttaaatcaccaaggtccttaactttgaattcgcgatccaagagaatggttatagtttgtatctcagccatgttgttgcctgtaagtataatgtcatccacgtatactaagaggattgtggtgatgtctccattgaaacggaggaaaagtgaatgatctgcatttgattgctggaacccatgagaacataggaaactagagagcttcgtaaaccattgcctactggcctgcttgagcccataaagggaccgttggagacgacatacgagttggggattgtcaaccgaaagccctggtggtatctgcatgtatacttcctcgtcaagttctccatggagaaatgcgttattaacatctaattgtcgtaggtgccattgattgagggaagctaatgcaaggagaaggaggactgtagtaagctttgccaccggagagaaggtgtcgaggtagtccagtccttccatctaggtgtaaccttttgccaccagccgtgctttgtgtctttcaatggatccatctgcccggtacttgattttatacacccatctgcaaccgatagcagtcttatgcggtggaagagaagtgagtctccatgtgttattcaactggagagcttgtaactcggcttccatagccttaatccagaagtcatggcgggaggcctcggcatatgaggaaggttctatgttggaggaaatactcatgacaaggttcctgtgtgcaggtgacaaacgtgaatatgagagtacggaactaaggggataacgaacaaccgccagagtgtttggtgttgacgaagcatggtctctatgatagtcctgaaggtatgagggtgcgtgtttagctctagtagaacgtctaggatgtgaagagggttggtcattggagggttcattggatgatggtgtcgctgtcgtgggttgtgatgggtaattatttatttgtggatcaagatacttgccggagaagggaaccggagaaggagctgggttgtttgaatctaattgctgggtttcagaatgatatggaaaatgattttcataaaatgtgacattgcgagacactgtgatgttattagaatgtaaatcatatgcaagataccctttggtgtgtgctttaaaaccaatgaagatgcatgggtgtgccctagcatcgagtttttgtcgattggctttgagtgtattgatgtaacaaagacaaccaaaaactcgaagatgagagatattgcatggatgcttatgcagtttttcataaggtgaaatgttattcaaatatggtgtgggaatgcaatttatcaaatatgcggcatgtggcaaagcataacaccagaaacttggtggtaagttcgcctaaaaaagaagtgcacgtgtgatgttgagaagatgctgatgttttcgttccgcgatgccattttgttctggggtctctacgcatgtggtttgatgtatgatgccttttgatgcataataatggtgcatgaagaattcaaccccattatcacttcgtatgattttgaccctgccattataccgtgtttcgatgaatgcaatgaagttcacaatgacttgtcgtgtttcagctttagttttcataaggtgtacccatgtaaaacgtgagtaatcgtcgactatggtgaggaaatacttgtgtccatgcatagagagtttagagcaaggaccccatatatccatgtgaagaagatcaaagacatgggatgtgtgtgagttgctggaagagaaaggcagtttcttatgtttcgcgtgatgacatgtattgcaaatgaagtcattgttatttcgtaagaaaggataacatgttttcatacatcgtagtctttcatgtgaggggtggcctaacctaaaatgccaaagatctatgggaattacagtgcattgagggtgagtgataatagagtttacggttttggtggtcaactagttgggcacgaggtaatagagaccatgcttagcttcaactgtaccaatcttcgtatggttgttcatttcctgtagtgtacatgatgtggaagaaaaaattagttcacaattaacagaagaaacaagctttgaaattgaaatgagattgaaagtgaaggcgggtatataaagaacatcatgtaaagttatattgggtgagagttgaatggttcctgagcaagtggcacgaacgaagtggccatttggaagctttactgtgattgggctgacttgtttgtgagagtgaaagttatgtaaagaacatgtgacatggtctgtggccccggaatctaatatccaggggcccgaaaaagaagtgaaggaagatggcatacctgagcttatcagggtgttaacggtacatgatgagatcgaggcaatttgtttgggttgagtggataccgtgtgtcctgtagatggctcctggattaaggcaaggagtgccttgtactgctcgggggagagtcgaaccaactcatgggactcgtggtgctgagcttgatcatcgttacccttgttttcaactgtcatagcactgttcacggtggttcttccaccgtaaggcttgtatcccggcggatacccgtgcttttgatagcaaacatcgactgtgtgtcctatcttgccgcagtgggtgcatgtttttcttcctccattattcttgtttctcgagttgtagttagaaggaaccccatgtttcttataacacacattttccatatgaccagtgcgaccacagaactcacaaacggtctttgcggcattaatggaaatatccttaggttcgaagttgatacctggtccggcgttaccaagaagctgtctttcttgttgagccacataagagaagatcttggaaatggcaggtatggggtccatgagaaggacgtgagaacgaatattggtgtattgttcgttcaagcctcgtaaaaactgcatggctctatcctcgagctttcgttgagcgataatggtgaacacattgcaggaacatctaatattgcaagaacagacgggatcaggcctaaagttctcgatttcatcccatattacacgcaaacgagtgaaatattcagtcactgtgagtgacccttgcttcatcatcgaagcttcctgctgaagatcggaaattcgaaggaggtcaccctgtgaataccttgacttcaggtcgcgccagatctcctccgctttgtccatccaaagtatactctgatgtatcgaggttgctactgaatggactatccacgagacaaccatattattacatcgccgccatgctccgtgcatcctatcggtctttaatggttcaggcgcactgccgtctatgaactccaccttgtttttagcacttagtgctgtgatcatggacctactccatgaatggtagttagttgaatctagtaccggagaaactaaggcagtggttgggttctcaccgggatgaaggtatagataactctccatgttattgatgattacttcactcatggtggattcgatatagcagttgtagaagcaacatatgcgcagcagaactcttctcttagaagagctctgataccatattaacaaaataaggaagcatgagaaagataagcgtattgaagaaagatgatcagctgcggtgtcgtattattcaggaatgatgaaagcttatatacacgtgatgaagggtttgttacaactgaaaaataaccatcctaactaacttcttcttaacaaacttaactaatctaactgatactgttaagacaatttgtaaagaaatggggcatgacttagagtaggagtgtacgtaggacttatactagtcctaccaaagtagtcaaggattcaagctaggtataatgctttatatatttttcatgcgacctattgactacttcaatataaaacatttgcacactggatatgtttggttttgttatcttattctttttgttgcttagattcgaattagcttttagattatggcctgtccccggggagcttttgatcaattttgtaagtctattattaaaaatttggttaaattaatttttttcctctaatttatttttttttcaatttaatcctttaatttttaaaatcgatttaatttgatcttactatctaaattagataaataatgttaaaaatcacatttttagcgatttaaaaccacaattaaatagttttaaactgtcataaaatacatatttttaatatcattgatttaatttagacgacatgatcaaattgaatcagttttaaaaatcaaaggactagattaaacttaaataataaattagagtacaactaatttaacctaaaaaatttataaggtatgaatgttaatttccattaagttaataggtatttacgaaaatgaatttttgttaaagaaaaataaaggttaaattgtaattttgattttcattttattttatatatgtaattttattcctcctattatagagattaagttgtagattttttaaattttagagtctaaaatcacgggaaacaacaggagactgagatcgttgatcagaaattaaaattaaaggaaaacaaaattataatttaatcataaataaaatataaaagttaattttaatatatttgtatatgcactttttggtaaatttatcaactaccttgttaattttacaaaaggatatgtacttatcctacctctagagaaaaaaaaggtacaaacaagatatgtaacattttgtggcaaaaagggccacatgatcgataataatatttattattaatcgcatgattagctacaaagtttttggtctggaaacaccttagtttcgaggaacactgttggtgaacatgaagatatcaaagatgataattaacattttttaaactaaaacattatcgataggtttcagtcctatatgcattcctaagaaatattatagtaattttgcattaatttaatatttgaacaattcaattattttctgttacaaagcaagtcatttttacttttaggttggccacgagccaattattggtggtattctagaggtggtatatgagtctctaacattcaagaaacatagcatatggtgggttatagataccactaactcatttaacaaaatagaacaagggaagtaatttaaagtctgaataattctctattaaacaaaagggaattactcaacatcccatcctataataatgtgttcttgaactctcaatgcttctctaaactgctgaaatcttgcttttatactaacagtgcagaaaattataccaacaataattttttatttgttgataaagtattttttttatactaatagtgcagaaaattgagctcataaacatacgaaatgaaataatatcgattcacaagcaacacattatatcttctcttattaagctatatgttttatggaagagttccattcatacaaaagaagtatcttttagcttttaattttttttttattatagctactttttatcttaagttatactgagtatcattttattttagtttcgtattgaaattgaagcatttttaaggaggagtatactaactaaaatatatcaattatagataaaagaaaacatgaaagttagggattccctccactatctagttacaaatgaaatccagacctaaaagtttgtttcatgcatgagatgaattctgattgccaattaagtcatacatatataactagtattcttgcttaattaaagttaattttttttaaagttttaaatttcggctaataaaaaacaatatgttaatgcgagttcagtttattttattaaaaaaaaaacgttttcttaaaatttcagagagaggtttaaaaaacattatattttaaaaaaaaaacattatatgtttaaaataattttaaaagcttaaaaatagagttagttatataaatttctctctgctgataaaaaaaattgatttggcttggattccaaattgaaagtttcatgaatatgaaaactaaaacaatgataacaaattgcaaccaataaactaaatttttatcaattaaaaaggaactttccaggccaaaaaataagcagaaacaagtgaacttaattattcactttaacattattgaagacaccgttatttatctaagaaaccgctacttaaaatatttcttttataaataacattttttaagtccaggacttacaaaattaagttaaacactcactttaacaatcttaatattgaagtgaatttttgtgcaaagggtttaaatttatatgaaattataaaacctacaaaattaagataagtaaatcattcatgaaaatatgcattatagatgttcttagtggtctaaactaatatttactactaaattttgtcattaaaataaattactttctatcataatattttataaaaactgaaacactaaatttactaaaccgtacataattttaaaaaaatactaaaccatacttaatatgaaactataatcagaaatgtcttatgaagaaatgaggaattttcaaattttataaatttacaaatttatataacttaaaaatttctgaaattttttaagataatcttccttaaatcattgctttagacctttatgaggagcagataattcacacacacgcacacaacacacaaaaattttcaattttttttcttaatgttgtttgcattcctttagaccttagaagcagtaattcacacacacacacacacaaaacaatttccaatttttcttcaaagtttctttaaagtttttttttattggataaaatcatttgatctgacaaattatttttaatcaaaacaaaacacaattcaaacctccattttctgtgtttaatatttatctattttccaatgtttaactcgacagttgtaatttatcacataaagaagctcaatttgtgtttttctaatataatttttttaggtctctaatatttaataataatttgtattacagagaaaaaaactaaagaataagtacaatctactcatactaaaatttgtgtcaatttgtttgtgtttttgaaagaataaatgtgttaatatatgttcaaaatattttaagataatttgatatgttaaaaaactgaaattagaacgaaaaaaaagtttcaatgtttttttaaatagaaaaggcatttttaaagggggggaatgttataaaagattttttaaaatttaaaagttttatccaacaaaaggagtccttattctagataacgttgtagactttggctaaaaaccggagggttcaatgcatccactagcataatattcttgcttgaaactccaagcagaatggggctaatattgattatcatgatctaagactaggaagcaatacaagattgaaaagcactcattccaactgagcaaaatatatatatatatatatatatatatatatatatatatatatatatatatatatatatatatataacaagaataataaagacaatgaaacctatatactaaatcaaaatcgcttaggaagctagattttaattatatgataaggttgtctatatcaaaactagtggtgacaacactttatccgatgcatgcatttgccaatgataatgatccaaatggaacttgtatatttgcttttgggaagggacatgctctagctagcgaccagtgtgctgctacnnnnnnnnnnnnnnnnnnnnnnnnnnnnnnnnnnnnnnnnnnnnnnnnnnnnnnnnnnnnnnnnnnnnnnnnnnnnnnnnnnnnnnnnnnnnnnnnnnnnnnnnnnnnnnnnnnnnnnnnnnnnnnnnnnnnnnnnnnnnnnnnnnnnnnnnnnnnnnnnnnnnnnnnnnnnnnnnnnnnnnnnnnnnnnnnnnnnnnnnnnnnnnnnnnnnnnnnnnnnnnnnnnnnnnnnnnnnnnnnnnnnnnnnnnnnnnnnnnnnnnnnnnnnnnnnnnnnnnnnnnnnnnnnnnnnnnnnnnnnnnnnnnnnnnnnnnnnnnnnnnnnnnnnnnnnnnnnnnnnnnnnnnnnnnnnnnnnnnnnnnnnnnnnnnnnnnnnnnnnnnnnnnnnnnnnnnnnnnnnnnnnnnnnnnnnnnnnnnnnnnnnnnnnnnnnnnnnnnnnnnnnnnnnnnnnnnnnnnnnnnnnnnnnnnnnnnnnnnnnnnnnnnnnnnnnnnnnnnnnnnnnnnnnnnnnnnnnnnnnnnnnnnnnnnnnnnnnnnnnnnnnnnnnnnnnnnnnnnnnnnnnnnnnnnnnnnnnnnnnnnnnnnnnnnnnnnnnnnnnnnnnnnnnnnnnnnnnnnnnnnnnnnnnnnnnnnnnnnnnnnnnnnnnnnnnnnnnnnnnnnnnnnnnnnnnnnnnnnnnnnnnnnnnnnnnnnnnnnnnnnnnnnnnnnnnnnnnnnnnnnnnnnnnnnnnnnnnnnnnnnnnnnnnnnnnnnnnnnnnnnnnnnnnnnnnnnnnnnnnnnnnnnnnnnnnnnnnnnnnnnnnnnnnnnnnnnnnnnnnnnnnnnnnnnnnnnnnnnnnnnnnnnnnnnnnnnnnnnnnnnnnnnnnnnnnnnnnnnnnnnnnnnnnnnnnnnnnnnnnnnnnnnnnnnnnnnnnnnnnnnnnnnnnnnnnnnnnnnnnnnnnnnnnnnnnnnnnnnnnnnnnnnnnnnnnnnnnnnnnnnnnnnnnnnnnnnnnnnnnnnnnnnnnnnnnnnnnnnnnnnnnnnnnnnnnnnnnnnnnnnnnnnnnnnnnnnnnnnnnnnnnnnnnnnnnnnnnnnnnnnnnnnnnnnnnnnntatgactcaagaatatataaatgtccattataatatatataggtcatgctagactaagaaattattgcatattagcgaatataatataatagtactctcttctcgggggctctgcctttggatgagagcaccaggaaggttaggctcaaagatgtgatggtgtacatgtacatatccattcataagcttttaaggataagtttaagaatatacagtatatagttggccctaagaaatattatcaaaatgtaaaagctgttcttttttcatcatagttcagcacagtgcacacattttttgtgtttccaagatgatactctcccagtatcctacaaattctagcaggttaaatcctgattcatcagctttattactatctataattctatatattgtcagaaacctgagaaacgtcttgctaattcatatgactttgggctgaaaaatatgaatatgcatgctatctaggactgtcaagtatcaggagaatctcctgtaatcatgtatagtaattatgcaaatatattccatgattaaagaagactctcttagtatcaatcacatgccatgaacgtgatatctttgaagttgtagccatgcatatttgttgcatcatattcttccttcttcaagagtgagatttctatgtcaagttaagaattagaatacatggagtttcagtctgtcaaatagagaccaacaaaatcaagtttcaaataacagatagctagacatgttcggacaagatctgtccacatcatgagcatatttatatatcagactgctataggaacgtatatatataggtaagcacataaatattcatggtattattattgcaattaattttaaaaatgatgattgatcaaacctggtgctggcatattcataaagctttcccgtgctggagaatatgacaaggccaacttgtgcatcgcagaggattgctagctctttggctttcttgatcaatccctttcttctctttgagaaagtcacttgccggctagtggaattgtcgatcctttcaatcacaatcttcccccttcccatattcttccccacctcacactaattagggtttctgaagaaattaattatatatatgtaaatagaaaagtgaatacaatacaattaataaacaaagttcagtaaattaaagctgtgatgagacaatgaatgaattctttcttacttggtgttttttagacggtattcaagatggtgcaagaatagtagtactgtggcggtgcctttccatttattttttggatggcaagttgggagagttttataagcagaaaaaaaagttggttgctgtgtgaaagtagtataagccgcttgtggtggcagtggccagtggggcaggattactatgcgggtttgattaaaaaaattggatcactgatataacctggactttagtttgtatactttctacagtgaagtattcaagaataaattgtattacttcaatagttttgagaatttttatggcgccgtcagccatataagcctctgacacgttaaaggttatatatatatatatatatatatatatatatatatatatatatatatatatatatatatatatatatatatatatatatatatatatatattattaatgtataattctgttttttttcctctctctctgtatataattgaaacatattaattaaaattaaaaagacataaaacatgttaaaaagcattgtcacatgtaacttgatttgaaataaaactactctaaaaagaccaataagagtgttcaactaaggacgaatacgataaatcaacaccttcaaaaaggaccttgaaaatgacattatacatacttatgagactaaaatatgctaatgtcataggattatcattcataggaataggaacaatcatagtctctataagaatagggttgaaattcctagtaacaaatgcttgagttactaactcccaaacattatttcctactttattccaatacttttgaaagaagacaaaatataatccagctggcccaggtgccttataattaaggattcacgacggaaaaaaaaaacttttttcacctctaccatattaaaataagctaaccatttatcatggctgattttgatcaatgcaagacatgtttctcaaaaagaagactattagggttgtcacaacttttgctttggaatatatttttgaaaaaggattgagcttcatgttttcaacacttcctcctcatagcagcaaatcttgttcatcatcaaagctaagactttattctttcttttcctaataattatttgggtttggaagaattttgtatttttataattaaccaaatttttaatatattttggaaccaaaaaatatccttttgttggagaacttgatcatattgagtctaaagattcttctcaagtgacataagagaagatggaaactcaaactcaagttcccgatgcaatcctttaatgtgaattttattctctcaaacactttttgacttaataattgataaatgttatgtatagataaattttgtgattaaatcatataattttttttagattttttttcttttattgcttatttttatgtgaataattagaattttaacatcattcaaattcttgtctagtaggtatttaaatttgtgaatttatattgttttgttattatatttaccgcataaacaaagagtaaaacttggaagagaagttgaagatctaatgactctcgctcaacgtgtaacactcgctcaacgcaaagaagttatatggagaagtcagataacatgtgaaggtgcgcttaacgcaagtcgtgcgctaagtgcgtgaccatcgactctccataggcgcggcggttgcgcttagcgcgatgttgcataaattttaagcagacttcacctataaaaagaaaagtaagcaaaggaaaaagatacagagctacacacggaagatccacaagattttagcttctcatagggagcaagggctaggattagtgcaagaacatgggaaatccaccctttaggagtcattccttccctccatcaccatccctctctaccctctttttttcccatcaccctcttgcaattgtaaagcatctcatgacaatgagaggctaaaccttccattgttgagagtctaataaccaaatgattgtgatataatttctttcctattatctatttaatgttattttaatttttattatttcttttctgtgcttaatttcacttactgtggtctaatcactcatattcatgtatttgttttaggatttaggcattgagagatgtttatcttctaagaatcgaaaatgtgtctagggataaaatgatattgtttaacatattttatgcatctttgtttctcatccaatttacttagtttattctcttaagggattaggagagatattaggtaaatagaaaaaaattattaatattacatcaagagtagttttgaaaaactaggccctaacattcccatcctgaatcaaccttcgcatcacaaccccaagtgtttgtttttcttgctcttgtatgttttagataattagtttaattttatttcaatttatttttaatttttcatcactaaaatctttgattcaatttattaattgtttgaaaattaaaaatacatcaatttaagtacaaataaagtccttgtgaatttaacacttggactttcattttattttattacttggaataatttgatgcacttaacaatgaattaacaatcatcaaaatatatgtaggtgtcaccaccatgatcttgagcactaagaatcaccacgtgagtcacagctgctatggaggtaatatttgtttttactcataagtcagcattccgtagtcaaaacaacaatgacttagggagaggtaatattcattttaactcttaaataagtaattcttaattaaaacaatactgattgggggataattatttcgaaggttatactgactttccttatttagtctgagttgaaacactcagatgacttgggcgagtgaagactgtcctaagaataccaagttcaacagctagaaccggtacctacacctaacatgaaatttctgaaatagaagtaacacatgaacttaagcacatctaatcatgtgatcacctcacacgtaatacttaacaaacccaatgactttttccgccaagtgcacctacgtatatgacccctctcaggtacaaacagtgtaacttgactcatttctcattttctcaaacattttctgacttgatcgtcaaaattatatatagttgtcaccactgcaatcttcaactgtggagcacggtgaaccaccatgcgagtcaccagaatcctccttctcgtggataacttaatgacatgttactaggtcaatgaaaattgataccatgaatgtaaaaaactgacaaattaaaaaaacaatttgatctaaacactataaggagccaaaataaatctttttaaactcaaagaatcaaattaaaccctaaaatataaataattaaaaaactaaaattataatttagcctgacttatataagaaagtcttcttaattcttggcaagaatgtatagcagtactagtatgataaaaaagctgccagttcaagtgaccgaccgaacgaacacacacatgcgaagcagttcatagaacatcattcgccaatcgagggaagccttcgcacgcgtgtgtcgagctcagaccaagggcgagcaaaatcgtgccattgtttgcgcgacccgtaaatggttgggtcacaaactgggacatccccacgcgctactatacttggaaatatacataattgtttttaggtcccttaaaaccgttcaaaaatactcgatttggctacagttttgtacaatttgtagtggttaaagtgaccaggtaaagtgtaaatggtcataaagcttggtctttgtctccaaatatatccatctttcaatgtatagatttgttgaacccacgtgaacagtgaaaacggtttcattcaccaataagattcgatcttgcccgattttttaagatggcacatcgattaaagtaacgtatactacgggatcgtttagcgcaagttgagtgctcttattaaggaatttagccaagtgtcaatgatcagctatgtgtacggaatccaattagcaagatagtagactttacctccaggttcaaaaattattttattgtttaattattccagctttggaaaatgctgcttttactggtcatcgtgccaatttgtaagtactttttttttttgtgtgtgaagaaattagcggcatgtaatcagtgaagcacatgtaacttaatcatttataagtatacttcttctgaccctcatcgtatttgtgacactctggattgattcgatcggtggaatagaaagaatataagaaaaaaattaatatgaaaattttgaattaaaataaaatttaagaatataagtttcatctcattttattattttattgtctatgttttttttttcgttttctttcaactcaaatgaatcaatctttaggaaaagacatcactttttctcgtaagttgcatatgaatgtatgtatgtcccttctcctgtcgaattatgattctcatatatgagccatatctatcatcaatttacgtgcagtgtgttcatcaacatgattctcaaaagtagccattagtagaagtgaaccacgaagatgaaggcatctgtgcttcatttcaaaacctagctagctagcatgcctgctgaatgttgtttgttaatggttcacttgttctccgcctttcattacaatccaaaagcaaaagacgtgcgcatcatactatgtcatccacaactaaataaatttatcatctcttcttcactgagacatatatatatatatatatatacacacacacatatatattaaagcatttatttattattatttataatttgcggacaaagatatgttgcggatatatgtatgatcgtgatggctaaagatatttacatgaagtgggctaaaaagaatttaattattagctagcagagcagcccttgacaactaatgtttttagttttacttgtctgtgggcgacgaaatatttgactttcatcaaaacgaaagtcttccaattttaggtttgttctgcttttaacttcaaatgcaaaagacaaaagaataaatactaagccatccctatgatgatattattcgacactaataatttaaaaatgtgctattaaggcatttttgtgactgtatttcaacttattacagtcgtcactaattcatcactatagaaaataatactttcaatgaaaaacatttatcactaataatttaaaaaattaacaccaagagaattttgtgaccatcactggtataaaaaagcgcttttcattgtcattctacaattgtttattgaaaattaatgtaataagcaatatagtgatacaacgtagttttgttcctctagaaccctttaactgaaaaatacaacatttccaacatagtttcagagagtaaaagtaatttttctttacttttttagcatggaatgattggttgaagactgaaagcgagtgcttttgttttcctcatcattttcattacagagagactgaatcttatctaggaatgtactttttagaacatatttatttttaatatttcataaagtatttttcaaaatgcaaagtcagtccaacactaaatgaagtctaaaataaattttaagataattttgtttactatataacattttttttaatatatgtgactttttgtcaatatatgtgaccttttttctgttttataaaaattaataacaaataatattttgttaattgatttaaggattgaattttagttgttttattctctgtaaaattatgttctgaatattactttaattttcagaatgtaaaaataaaatattgttgcagagagtacattccgaaatatgactctcttaatgactatagggagacagaatcatcttggccatgtttaaggagttggatgtggtgcttatatccaataaatattcgtcgaacatgcacgtacattgttcgggcccaacaatagttacacttacatgcaagagaataaaatgaggatcgagatataggcaccacagtgggtgtagtttgtagaaaagggtgaagaactagatgtagcagcatgtatgggaggagatgcaatagcaattggttttaggatgggcttaagaaagtctaaatatgctctcaaaccttaatgacaaaaagactatattaaatggacttaatatttattatagtatttatgtttagaataatgtgatgttaatgttatgttttttacaagtatactaaatagtacaagcagtaaaatgaaaagtctaaggatgtttttcaaaagacttgttaaattattgacaatttacacacttttacttactaaacaaaatatagaccaaacttaaattaacaataattaaaatttaaaatttaaggtgaaaatttgaaataaaactaatagaaagaggttgttttattcttaaagatctaagttacaaacaagaaaattacatgaaacacaatagaagagaatgattgggattcgacttcactaaatcactccctctaatataaacaagctaataacttatgtttatcattcttttgttatcaccaactcataaagatgttttatccttaattcctttcatgaagagtctgagtctcatgattaaactattaacccttgtgtagcttaactaagttacttgttttaagtaaaaaaaggagtcaaaggtggctaataaatctcgttctattcttagcaacaatacccattaggtgttctttttctgttcatagttcaaatacatttttcaattgtatttagaccataaaatcaaacaaatggatgatcaaaccaaagcaaacattaaccaaagaagaaagtacttaaaacaagtaacttggctactcatggatgagtttgagtttagttatgtcaaaccccaatcaaggggaactcagctactcatggatgagagaagctttaaaaatggtgaagagaagaagaatgtggaaaatggacgaaggagagagtcccacgcatccttccttgtgccaaaacctaggtccaagaagaataatttattctattgcaaaagcctcttttaatgctttgtttttctgttaaaaaagtgacagtacaacatttctagcccagctaaccaatattctcacagggctagacctccattaataaatactagaactacatggctgggcaagacacccttatgttggttgggctagaagtgtcttcaaaatgaggtgttctctgacttgttctagtcggacgagaacttttgctcattgggctaggaacacttcgagactgaaatctctttggctgagtgagcacaccactatctggttggaccaaagttcaaaacatcttttttactttgactcttcctccttcaatggtgagcttccaaccttcactcgaatcataggaaaacataaaaaaaatgattccaaaatctaaacatacttagtgattcctaaaaagttaaattctaactaaaaagggagaaaaacaagactttaaataaggaaaagataattagtatcattgattgatatcaattacgactatatataaatgtttctcttttaatttttattttatgatttgtttttgtttttactctagattagattattttctgtagacctagttttagctttgtatcagttggtcgccataaaggcgcaagctgctggcatccataagtgaggagatgatgactttgttcctctctatgaaactacgtatcttctttgatttttattgaactatttgatatatatatattctacaaatctttataaatactatatgtgcgtgcgtgccctgttctagttggacggtggtttcagaatggactatcaaggatctaaactaaagtctgttgtggactcgtttgaaatctctgaatgtagaccaaggtttcgaaactactaaaattcccagcattaatgggtgggaatgggatactagtaaatgcatttttatgcacaagtcggtaataaccccaccaaagtgataagatgtattaaatgcatacctaattcaatgaggctgctagtatttttaagagatataagtggttggattcttggatcaaggccatagtcttctcaatagaaataatattatgtactgatgtattataagggtgatttttctccaacccatggtacagtatgctacgaacgtccataccctaagctcttggtactaagatgttaattgactttgatcaacatcaacatcaaaaacgggggtgcaaataccaaaagtttaagggaaaaaggtaagtgaccattttggtccctttgcttttcctttggtcaattgattagaattttttgagagattgaagaaacaacttccctttgctttttcctcttgtataatcacggccaaaagactttgttaaccgtatgtattgggctccacagaatctgactgagttgaatagaatcattagggctccactacagtacatagagtgctgctaggtgcacctagcattattgctgctgcacccagcactaaccacaaaaaaataaaaatatcccttacggatcaagttgattcgtaagttaatttttaagacttacggatcaacttgatcctaagtcttttatggatcaaattgatccgtaagttaatttttaaaacttacggatcaagttgatttgtaattcttttacagatcaagttgatccgttagtcttaaagatcaacttacggaccaacttgatctgtaagggaagaaattagcagggacagttttaccatttttaaagaatgctgggtgcatcagcaacaatgctgggtgcacctagcaacactccagtacataatagatcttattattcagcaagattacttcaatgtaatatatcttctctttggacttgggccattattttaccataagggggaaaaagggctttaagtaatggacaaataggtccagtcacaaaagtcatcaccaggattccaggaacatatattgggtgtgtgattttccactaaatggatcactaaattgaaattaattactggcttttacttcctgaacttcccatttttcttcctgtaccccacttttaaaatatccctctactacccttctcattttataactttcgtcttccctcttctgaacctatttctcctaacacaccaaacaccccctacagctactttaagcagccttcacctacattgaagtggcctctctgttggcggtgctttccatagttgtccccatttattgaagtgtggttttttttccatagccttcacaaaggttcattcaccccccccaccccccccccccccctaatatttatggctgtgtttcctccatcttcatagctcatgtgaggatggctcgacacacatactgtaaggtgtgttcttttctacttttattcatgtttttttttcagaaaatggggtctcgatgaagaggaatagtatcaaaagtattcagataggctacttcgaaaggttatcattatggaaaagcctatcctgaactgcaatgtaagttctggattgttcgttccagaataactattcctgaacgattgtttttgtagtctgaaaaggttattccagaatgggaatttagtagtccggaaaaactattcccaaaggtggatttctggaatggttattgtttagtacgaaaatattattccataaggttttgttatgttttggatttactatttcggaaaacaaacaagtaacattccggaaagggctaacaagaggacccatttcttgtccaccagtttgctcaaaaacttaattaatttattaatgaaacttaaaaaaaagaaaaaagaaaagaaacgactactaatgaaagagttaattttaacagttgataacatgatagaagtcgataaagattttgtttgataattgttctagtttattttttatattataataaattttacgaatcacttttaaataagagtatatactattctcttccttattatgtttttctgttattgtatattttttatttgtatttttcattccttatacataaacaattatatttacttagatctaattaattttaagtttgatacactatcaaattaaagataacattttaaataaaccatgttttaagacataaataatattaaccaatcctaaaatggatttcagttttatattgtaaaatttgatacatattcattaaacaacttttttattgaaataaatattttttcgttaattctgaaaatctcatccctttagttttttttctcgctcaataagaaaaaaatattcattattaaaattaaaaatatttattattctctttaatttatttatttatatatttttttaaatagtcgtaaagtatatgaaaatttttcttgttatttacaatgtcacactttaattaactgcatcttattcatttaaaatattttcgtttattaatctctaaaagaaaggcatgcattttttttggaaattgaagtaactcaatatttttttggaaattgaagtaactcaaatatttttttgttatttacaatgtcacacttttcaatatttttttggaaattgaagtaactcaaaatgccttttttgctgagctcatggctgttatcacagcaatcgaaattgctaaccagagggacgtggaaaaagctttggaatggctcttgaatgcaatacaatactgtgccttcaatctgttaagaatgtgaatatttttccttgatgcattagaaatagatgaaaaaaaagctttgaacttgactagatctaccacatttaacatgaaggaaatccgtgtgcatataggttttgtctctcacaggtcgtctataaaaggcttttatgtattttattatctgttttcacttaagagtagtatagacttcttttctctttctctccccctctccctctgtctctattatatcgatctatctatactttttactttttatttttatctttttataattgaattgacctatgcaattgaaacctagttactatgattctcaattcgctcttcttcttaattcacctaacaccgtaaaggcgaaataggcaaaaacaaacacacacacatatatttgatgtaacatgaagggaagtattgacattactagcgcccatgcaaataaatattattcataattttgaaccaatccttattaaggaaacccgaaacagagacctcacaaacagtaacgactaacaacatatccattaaaccataaaagaccatcgaccattctctcaatatgcattttattctcttctcttctcccagctgttgtgtttatctacaagaaggaattgaaagaccatgaaagaatatcatgtgtttcaaccaagtcaccggtggcagcactgaaaccgaataggacccgttcgggcagaacagcccctaagttaacgggatacgataaaacagtggcattcagtttcacaggactatttggataagccaccgagacactcaatattttggtggaagattggtagcttatgcgtgcctttcctattgacccttgtggttgaatatcaagtggccatggcgcagttgccacagacctaatggaattgatgtcaattccaatgtgaggagaatcagactctgggaaattagggtcccattcatttgcaaagctgtcaaactcaacagcaacaacttggtttagggaagtgttaaaggctgtttttttgttgaagagtccgaggaagccaccacttgagttgtctgggaaatcaaagtcgagtgatgcaaggtagaaggtgaagccgtcgccgtggagtggtgcaccctttgtgttcacgacgaaggagaactcggtggcgaagtttgcgactctcccagtttttgcgtcggagagatgaagtgctgcatagaatgctgagaggccaacgctgtgttgtgtagggtttcctcttttgtcctttttggtgagttgtagcactccacctgttgtcttggcactaccatcgagtagtatgtttaaagcatctggctcaaatctgggtaggttgaaagaaaatgagtctgatttggcgctggtgattagcaagaggaaggtcataaggaaaacagatttagggttttgagctgcatggctggccattgtgttgttgttgttgttgttgatgtgaatgatggtgatgcttagaacgagggaagaatgtagctatttataggcctttgggttatgaaggatgttttaggaaaataattaaattaacaacaatacatttgaccaaactaggctttgcatagtttgtttggcctttgtcaaacataggcgaaaagagcgaggaagatttcctatgaaaaaataaacaatcaaggttaatcaattagtccgagatatgtttctcaagatgtttttggacatcactgtttgtccgtggagagatttgctttgttccaaacaataatgtatataattttttagttgttaataaaccaggacattttcaaagaacaagatacagctgtaattatactataaataatgcggccaagtaaacgagttataccttgttatcaataaaattaattaacatgcgctatacatatatagcatcacaaagggcctctgcatagtacaacgatttaacacaacaatttttcgatcttatcccatttggcctccatctatgcatcggtaacgtaggatttgcatattatcccacaatatatgatggaatgtacgggtataattaataataatataacgtaactagtttacagattacaaactttttttttttaagttgaaagacaagttaaatatgactacataaacaaggtgttacccaatataatatatggttgacactatatacacctatgacttttttttgtaatgcaattatggctagctttcatgcattttgcaaatatttctcaccaatacgtatccaggagcatattttcatatattctatttttttcttataaactgatcgttttcagatatccaaagcttttctgatcatcatgttttggacttgtatattcaaacttttgtagaattcccttggattttccaccttcattagttggcgaaaacggcaacaataattaaacttaacatactatgcaagctgcatgccgtattattcggcaattgtattcttatttatattcttagctggctaaagaggcctatatatataacctcagtcctcacattgcttcaggcatctatcaccacacaatggctttccccaactcaaaacctaacctccttcaatctcttagtccccttatcaaatttttcatccctttcctcttgttgctacaacatcacagtgtcaagtcacaacaacaacccccatccccaatgtcagcatacgaaaccgttggcattgacttctcttttttcgacaaagatgatccaaacgtacttttgatcggcaatgcctcagtatctggtggggctctaaggttaaccaacaccgaccaacttggcaaaccagttccacacagtgttggaagagtagtgcatatcacaccgatacacctctggaacaagaacaacggacatctcgcagacttcacctctgatttctcctttgtcgtgaaccctaagggttcagcccttcgtggtgatggctttgccttctttcttacatcagccaaccttaacttcctgatccccaaaaactcaagtggggggtatcttggtcttttcaagccggaaactgcactggacccttctaaaaaccaaatagtggccattgagtttgatagtttcaccaatgattgggaccccaattcaccaaaccagtctcctcatgttggaattgatgttgactctattaagtcagtggcaactgtgccatggcctagtgaacttgaacctgataatgctgtagcacatgcgagcctgaactacaactccgaggacaagaggttgagtgtgtttgtgggttaccctgacaataggaatgccactgtctctgctattgttgatttgaggaatgttttgcccgaatggatcagtgttggtttctctgcctccactggtgacttggttgaaacacatgacattcttaactggtcttttgaagcagccttgtagatccagcggctctcagagttgaaggagattatatccatcgctcccttttaataaaaataaaacgtttccctttgtggattctgtcgaagttataattgtatggttgttggtcgagtacattgtttcttccattaataacataccctcctcatgtttgtattaaaccattggcattatttttttcttaagtcagtggaattcttcaatagcaaactaaatttacgcagttaaccagcttgtcttacatacgtattcgttgatttaaaacccaatgtacttcaatgttcaatcaatcaatcaaatatatatatatatatatatatatatatatatatatatatatatatatatatattaaacctaaagagatatggatgagaaagagagacggagtccaatcccacgaagagacgtactaacgttaatagatagtgccagatggaaaaagataaagaacacataaaaagtatataatgtaaattaagtgtgaagttatctatattaagtgaatttaattttctctcaaaaaaagaaaagtgaatttaatttagttcctgagcaattcttcttcttcctacccaatgtctaacatgttaaaaatttataatttacaagaaagaagtgaatgtaagtaaattttgtaaagttaacaatacctagctacttatattttttttaggtagattactttagttttcttaaagcacactaaatcattttagaaaatttagtgactaacattaaatcttggatatatatataatattaaatcttgactatattcttacgtaaagtaaagttctttgggataaaaaactatttcttttaaaaaaatgaccttgaactctaaatatccagacatggttttgtcaccaccccttctaagcatagcataatggctccgaggatgcgttggacttccaccctctacactcactttgttcatgccattgaactattcattgggggtggtcaccaaagtatgtttcatttttctttcccttgacttctattcttttcaataattatgcatcttccccaagttgtgttcaagtggtaaaattggaaatgaataattattttatttaattttcttcttacatgttttcacaattaatctttcttttacatgttttcacattcgatgtgaaggatcccactttggcaaatgttaagtctcatttgcaggtaatctcacttgattatgaatttcttgagctcatggatttttttttcatgttattttaactttctttataaagtactactatattatataatgtttatgatgctcaaatttaaatccaacgtaccagatggtaaaaactacaaatacgacggtggcttcatcaggttagtgtctatttcattctatcttacattgctggaagattaaaccgtgaatgtctaattaatattcttatctcattattgtccatctaactttaattttttttatttgtctcctttaatcatgaattagggcaatcattggaaattttcttacgatgtgttccgttgtaacaaaaacacacatatatgcacatgttagaacaattggattgtaaaacattaataaataattggttaaatgttatttttgattcattatgttttagtgctattttattttgatacattaagttttaaaattttcattttaattttttgtgtttttaaaagtttcattttgattttttatgtttcaaaagtttttatttttatcctttgtgttttaaaaagttttatttaggtcatttatgttttcaaaagtttcatttcaatctttttactttttctaaagtttcattttgtttatttatgttttaatgtttttcattttaatatattaaattttaaaagtttcatattttaattctttgtgtttttaaaagtttcattttgctcattttttatgtttctagcaacaaatattaatatctatttaaaaaatctgaaacattaaatctcgatggcaatcaaaaactttagatctgacatggaacaaaataaaactttcgtaaacataaaggtctaaaataaaaattttaaaattaaatgtaccaaaataaaataatattaaaatataatgaaccgacatttaacctaaataattttgtagcttcaagcatttatgaaagtgatagagattgccaaagatagagttgccaaaaatataatgaaccgacatttaacctaaataaaactttcgttgtaaggatctttttattactttaaaaacatttggcttgtggcaggtgatgggttgcgcttggggtgtcaacattgttaattggaatgtcaagtgttagccttgatgtccgtatgccaacatcttattaaaaaacactatagttaaactaataaattgtatttgaaccaattcgttcactaatgcaataatcaatcggattttaaaatcatttgtaattgtaatgattaaataggtatgatttctacacaatgtattaagggtgtttcttgtaaatcaataatctaaagagaattagatgataaaatttgtacctgacataaagaatcgaacccacttgttattgagaatgagaatgaaagtatactatcctctacacaatgatttgtcaaactgtatcttaatggtctactgaaatacaattaagaaacctatcataggaggacatagacttctcattggacatccattattacattacaaatgtgatcttagcaatatttttttttttcaacactcagtaaaaatgttactaaaaactttttgcaatatttaaaaaatgtcacaaaatataaataaatgttactagttgttaataacatttaattatgtgacgatattttttaaatgttaccaaaagtttttagtaatatttttactaagtgtaagacaacattttcataaacaaataaattattattttattaaaatttggatcttttatcttttacctccaaggtctaaaccacaagcaattagattttagtgaaataatgggaaatcaaatcatcaatggagaagataaaaatttattctaagactatatttttacaagtcattttaattaatttttaattttttttactaactaaaaacacaacttgtctgactattcagtaaatctttaactacttgtatctactcacatagacaagtcattcataagattgatatattataaaatgtttcatgtattattaattatatggattttttaaaatttaagtataacttaaaggatatatattaaaataaaaatatttaaaattgaaagtaaagtaaacataattaatttaagaatatgagtaattaaaatttgagatgaaaggaaaaataacataaaatgaaaacaataaaaaattgaaaatcaagaggagaataaaaagaatttaaaaaaggattttttttaaaaaaataatgactcaaaattaattaaagaatataagtaatttgtaatgaaagagaattttttaatagaaaaagattataaacaattaaaaattgagatttaagagaagaattaaaagaaagagataaaaaaacaacaaaagattctctgacacacttcattctattgattgaaaattattgaaaataacaaaaaaattgtagaaacatatatatatatatatatatatatatatatatatatatatatatatatatatatatatatataatttttaataaattttaatcaataaaagagtacgtgtcagaaacagtgtgttagagtacactctctcatttctaatatatgaggaaaaaaaatggattcacactaactaataaagttaattaatcatatttaattatatcaatctcaattaaaaattactatttcattgaaacttagtatcaagaataaaaaaatcaataaaaacttcaacctcaattaaatgaatgatattttagagataatacattaaataagataaaattaattgaatttttttatatttaaaattaagaaaaatgtattttttcttatatttgagaccgaccaaagaaagtatgttgttaacactcctcaaaaagatttttttttaaaaaaaggaaaaacatataagaaatgatgaattgaaattaatttaagcatattagtcgttacaatttgagattaaagagaagattttaataaaaaaaatttaaaacagttaaagatcaatatttgcctgaagaataaaatgaatattttttataaaaaaaaaaaaagaaaacataaaaaagctaatgacataaaaatactttataaaatgttgagttttttataatatagaaaatattgacttgagagatataaattttttatcattaatatcaaatactctatctaaaattcaattaacaattcaccaagattaaaaaataattaatttaattagtaacaataatttatcttcaatttatacgtattttccaaaactttccctactatttatgatacttagtcttattcttttgccaaatatttttgttagtgttattttttttattttctctcatcaataatatattttgttattttgtttttccttgactatgcatctaaatggtcaaagtagtattctccaaaatattctttatacaaaacaaaattagactcccaaatatatgacattaatgtttaagaaaaaatattcacaattaaaggtatttctctaaaaggaaaaaaaatattgcatcagacattttatattggttttcataaaaaggaccaaacttagtctctaatttggttcttataaaaaggattaaagagactctaaataaaaaaataattaattttaatatatgtatgtgtgtataaatatataattaattttaatcaaataactaaacgtcattttatacatatcaactaacttatcatctaattttattagtcactttcaattcaactagtttgctaattgttaactccttgacaagtatattgttgatttcttggcaagcatattaagttccacaagtagtgtaaaatggtaagaccaagtatttaatttcacagagactatgcttgtaatatatatataatgattaaacaattaatgaattccacaaagattgtatttgtactaagagatttttgcataagaatcaatattgacaaaaataaaatatgagaattaacaacagagcataaaaaggtgagaagacaaatgcttggagtgtgaagttgatgatgagtgtggaatgtgttgggggttgtgcttccataacctctcttgatgtaatcttttattgatttttctcttttaacattaatatggttatcacccgcatctactagtcttttctaatcaagatccctcgagtgaaagaacctaaatcacttaatatcactctcaattccttgacgattgattactaaatgatttgcattaacagcagatatgcatgcacaggctaaagaagaccaatttatccctagatatgactcactttagatattcttctcaagttcttagcatataaacattttccaatatttatatcctaaaatagtacatacagatcgatgatcaaacaataagtatgtgaataagctcaaggataaataataataacaacattatattaaaagacattttataatcattacatcatagagagttttggattaaaaagcactcaacatggttgagttttagcctctcattctcatgaggggcttacagatagatggagtaaattataggggatttaatggaagaaaatggagtgaaacagatcagtcagagctctgaaaaatggattttccttgcaccagctagtggtggagttcctgtgttgtttctcttctttctgctaccttgcttcgtggtgaagccttcctgaatgaatggatgttgattaatatatatacatattactttttgcaaatatcttcccacttgatgaccaatcagaacctccattgtgcactaagtttgcatgtgcgcgctcatgcaaaatccaggtggcataagtgatcatgcgctaagctgtcaaatgctcgctaaaccaccatatgcatgcgtgctaagccatcagatgcatgtgctaagccatcagatgcgagctaagtcaccagatgtgcgctagtgaggatgtcgcgctcagtgcgacacttcagttcttcaatctttttttatacctctgctaaatccttatacaaaaaacaaccaaaattattataaaatcattaaatttatcatcttcttgataaaaactcaaaagaagttcagttcatgttgttttaacacaaaataagcaataaaagagaagaaaactagataattgttatatgattttagtatgcaaatgacgtatgcataacacttatcatgcaccaatttgtacaagtagtaataaaatagtaatatcgagtatcaagtccacatggactttgtttgtattcagagttatatatataatgtttaagcaatttatgaatcaaatcaaatcttgttcatagattaagcacaattataaactaatgtaaattaactacaaagtaaggaaagagtaagaaaacaaacactccgagttatgaaatgttgttggtatagagttacgaaacgtgttgggggatccgcttaccagaactacttttgatacaatcaaaattgatttttctctttttaacatgaatatgattattaaccgcatcttctaacatactctaaccacgatccctcaagtgagagagcctaaatcacttaatatcgctcctaatagcttaagagttatattaaataatttgcattatgagtagagatgcataaataggctagacaataccattctatacctaggcatggatcacctagatgttcttctcaagttcttagcatataaacattttacaatgtctaaatcataaaacatttcatgaaaatggatgatcagaccatatacctgtgaatgagcacaagaaagaacaataatatcaacattatattaatagatagtttagaatcattacatcaaagagagtttggtttgcaaagctcccaataacaggtgattttagcctctcattgtcatgagagacttacaaatataagaggtgaaatgaaatgaaagaaaatggaagagaaacaaaatgaaatggatcgggcagagctctggaaagtgatttccttcaacaatggctttcaaagcttcttgctttgttcttatttcctctgctttctatgatttttgcgttctgaaggaaaaccaaatattttcttctttttaaatatcttcaccaactaattggtcaatcataattttcttgtgtgcttagcgcgatgctcgctctgagcacgcatttccaattggattaagtgacaatgcgccaagccgcaggatatgcgcttgctcgtgacaattgccttctaatgtggcttattgcattaagtgggcttgtttgggctaagcaattttgacccgctaagcgagaatgtcatgctgagcgcgacactttagttcttcaatccccttccatgtctttgttacatctctacaaaaaaaataacaccaaaattactataaaatcattaatgttagcatcttctaaataaaaactcaaaagaagctaagttcatgttgttttaacacaaaagtaacaataaaagataagaaaattagataattgttatgtgatgtcaatatacaaataacgtatacataacatttatcactcataaacttttttgttttttagcttatagtttatgattttttagttagcttgtactctaatttttatcaaacataatcatattatataagagataattaaaaaataaagccttaaatttataatagacaaatagatagtatagatgctacagtaaaatatagaaaatataaattaaaattattttaaaaaaatcacttgagagataaaaatgatgtgttattaatatcaaacataatttttaatatctcattgtgtttaacattaattaaacgtacatccttaaaaacattaattacatatatttgaatattaattaatgtaaaacacttcagtttttaaatttttagctcataagttataacttttaagctatttttttggggcggaatgaagtgaaaacactagaatttaaaattaaaggccacaagaaaatgtggtagaaattaaaaataagattatgattagagataattaaaaataatttctgaaatttatgatatacaaattgatattgtagatactacatataaaatataaaataatataaatttaaaattatttaagacaaattcaccactaagtgtatggatcaattgaggtgagattttaacttaaatagtgattttgggtttgaatcttgatacaattgtgctaaatactttctgtaacatttcatttttcgtatataaattaaaaagattttttagtaaaaaaaaataatagatttttagaaaatagtgagattttataattaaaaaaataaggaaaaataaatatattaaaataatggtttgaagggaaaaaaaaggaaagatatttgatttattcatttgataggaaataaaatagaatatttatttataaaataataagcaaaaaaaatagagtaaataataggttgtgagtaccctaactataaatagaggcaccttagatgagttttcaaactaacgatactctctacgtctccttttcctctcaatttcattttcccttctcctcctcctaaaactctctctttttcccgcataccaccaaacctatctcagaataaatgatgatcttgaactcattcaccgttggatcatcgtaaaaagtgagcatcagattcgcaactcttttacgaatattttcaccgttggaaattacaaaaacatgtctgaacagaaagaaatatcctttgcatcgtagctttttattttcccatagaaacccaaaaatatctcagtaaaactacgatcccagactcattaaccgttggattgttgtgaaatttttgtacatggtttgttattcatttccgcatatcttcactggtgagatttgcaaaatactgtctttagagggagaaatactcatcacacgtagacagtgaaatgaaggcttcaatcccttctcctttctctaacgcttggaaaccctatcagaacaatcaaaggaaaagcttgaggaatctcaggaaactgttggagatgccattatcactgtcaaaatacacacgtgagcccgcttagaggtaagggatcaatttatcgcaattggggttaaaatgaacatgtgtaggaattcttaaaggatcaaattagaatttattttgggatgtttattgtattaaaatttttcttgtatcattatgtgaaattgtttgaggggttttactccccgtggatcgagaaatatttttgtataatttgtttgtgttttgaataagattagcataataaatagttgtattgggattatgaaattgtgattgaaattgtatataagtggtaaattgaatatatgatgaattttagaataatatattactttgaaattataatattattatggagattgagtataagtgcaaagttgaatgtgttaaattacgatatacacgtaaacatgagatggttaattgtgacataatgagatgtgaagttgtgaacatgagttttagttgtgaataagtgtgtggttaacacttgatgtgacattacttgtgttgtgagctgtgaattatacaataacccgatcagtgtttatcttgagaaaaatattgatgtgcaatgttaaagggaaaatgtaggtttcctacttaggaaccaatattaaattatagcgcaatgtgttaaacgtgtttgaaacacgaatttgagattgtgggtactgtataatttatgagcagtgtctgtttataatattgttgttgaaattgagtataaatacaaagttaaacatgtgttaatttgtgagatacatgtaaacccttgatggtggattgataactgctaaataatagtgaattaatagtggaaaatcggtctaaaattaacttagaattaattatttagcagttatttatgctttaatttggaaagatttaattaatttcgaattttgattgcagatgtgaaaaagggaggtacaacaagcaaaaaggggaaaaaataaagaaaaaaagaagaagcccaactccagcaagacgctaagcgcaagacatgcgctgagcgtgaggtttcgcgctcagcgagactacgaaggcccaagcccaagtttgcacctataaataagagggtcagcctaggaaaaacaccaccacagaaccccctctcctaggggtttcatttactccctttctttcacctctcctctcattgtaaagccctcatgaccatgagtggctaatccccctagctagctagggcctggcaggcctaaaaagccaatgatgtattgagcatttcaagagttatcaataaaaagaggaattccctctaggttctttatttatttaccgttctttctttttacatcctgtatctctgaacttgttttctgttagggtttagtccactcgggagagggtaaaacctaattaggggtatggaatgaatacttgaatctgttttaagggttagaccactcgggagagggtaacgcttaagagaacactaaaaggaggaaattatcgggttatcttttagagggtttttcttccagtttcttttatctgcttttctttcttgcttattctacatctcggactttgttttctgttagtctttaggccactcgggagaaggtaaagcctaattagggataaggaatgaatgtgtgaatcggttttaagggttaggccactcggagagggtaatgcttaatagaacaataaaagaaagaaatcattgggttaacatgacttagtgccccaatgtccatgctttagcaaacatctagaatgtaatcttaatgcatcttaattattgagtcttcgcaaagggcatttggaagataggtaattaaggtaggcttgtcatcgtgaggcatcaggggcaagtagatggatagatgtggggcagaattagttcactggtattgataacagacaaatccagaatccatatatctaggctaattagacttgtcaggttttagcgattttaatatatagattttattccctatttttattgttggtttttcttagattttattccctatttttattgttggtttttcttagaagtagttattccttattttactgttgggttttaggagtaagtatttaggtttagtagatttagattttatttatttgaatttcgtagaagtagttatctttattgcaatttaaatattttatcttctaattttatcttttaatctgatctttaaagagggagcgttttgatcttttatctttttcttttatcttctaattttatctttaaatatcttatcttttctttaccttatcttctatgtttctttatcttttattttaaattcttatctcttgcttttaatttggatttgcattaatctaagtacaaacaaagtccatgtggattcgacagttggacttccgagaactttactacttgtgacgatttggtacacttgccaacgagttaacatggattgtgacatcatgagatgttaaattgtgggcatgatatttggttgtgaataagggtgtatgttgaacacttgatgtgacaataattatgttgtgagctgtaaattatacaataatccgaccaatgtttatattgagaaaagtttttatgcgcagtattaaagagaaagtgtaggttcctagttaggaaccagtgttaaattgtagcgcaatgtgttaaacgtgtttgaaacaagagtgtgagatcatgggtattgtataattcatgagcagtgtttgcttgtaaaaattgttttaagggttggacctgaatcaggaaggtgaagctctaacggattcttcggagtctaggccttgggggtaaaaaacactcggtttaagtgctcctttaagcctatgttgatcccatatggttggaacattctcgcaaaatggagtgaccctgactggtcaccttacgattttacttagtgagagtgacctgacatacccattgtgtggtgtgtcttgttatgtactcctaagcaccccagggtgatttttcactgacatgataccacattgcatttaagcttgagtcttagtataattgttgcataacgcttgttaattgcttattatgaaattaatgagtgttattgtatcttgactcgagtgtatgattcatgtgtaatgtgattaataattgaaaaatgaattttaaagataaagtggtgaagtgacgtgagttgtattaagttgagttatgttataaatatttccataatttattttgattacgtcttgtttatttgttttgttatttttttttgtgataactcacttcctatgcactatttatgtttggatcatgtgatgatctcgaaccttgtgttcgtatgagcagatgactttaaagaacctcgtgctactcgtgctagaggacgttaagacacaatgctctgataggatgtgacattaaagatgattttttattttaattgcatgatgttattttattttattttacctcattgatttaacaaaacttttttttgtaaactttgacggccttgttttgagccgaatatgtttttaataagtcttatttagtaatggtaatagtgaagtgaatgtgaacattttatccacgtgaatttgttgatcaatatttttatatgttttatttatttatatgtatgtcgaaatagagggtgtcacactttcgactcaaacacaaaataagaaaagattcacttgagataaaaaaaatgatttgttattaatatcaaatataaattaaaacaacaaatggatgcatttggaaatttaaattatgaaatatttggaaatttaaaataattaacgtagagtaagtttaacactaatttttaatatctcattgtgtctaacattaattaaacatccttaaaaacattaattaaagtaaaaaactttatttttaaaattttagctcataacttatcattttttgtgtggaatgaacggaaaacctcataattgataattaaaagccacaagaaaatgtggtagaaattaaaaataagattaagataagagataattaaaaataattccttgaaatttataatatacaaattgatattatagatactataggtaaaatataaagcaatacaaatttaaaattatttaagataaatttgtcattaagtgtgtacatcaagtgcgtgagtcatctcacatgaaattttaacttaaaggatgatttcggattcaaatcttggtacacttgcattaaatacttccaactcaaacaaacattaagaaaagatttatttgagataaaaatgatttttttattaatatcaaatataaattaaaacaaaaaatacatgcatttaaaaaattaaattatgaaatatttgaaaagttaaaataacaaatgtaaagtttaacactaattttaatatcacattgtgtttaacattaattaaacttcattaaaaacattaattaaatgtatttgaatattaattaaagtaaaacagtttattttaaaaatgttagctcttaatttataacttttcagctattttttttttttggaatgaagagaaaacccatataactgaaaatttaaagacccgagaaaatgtaatagaaattaacaatgatattataataagagataattaaaaataatatcttgaaatttataatatgcaaattgatagtatagatactgcatgtaaaatataaaacattaatattataataagagataattaaaaataatgtctggaatttataatatgcacattgatagtatagatactacaagtaaaatataaaacaatataaatcaatgaagattcacaaccaagcgcgtgaatcaatcctggtagtcttactcaactcaaacacacattaagaagttattcacttgagataaaattgatttgttattaatatcaaatataaattaaaacaaaaaatgcatgcatttgaaaatttaaattatgaaatattaggaaatttaatatagttaatgtagaataagtttaacattatcccctctgtaccattataattgtcgtctaagagaaaaaaattaatctattttaaaataattatcattttactttttaatataaaattaatctataagtgaattaatgatgatataaagttaattttgtaaaattattactctctttcgtctctttattattttttcttgacgtgtgtaaacataagatgataattattttaaaatgaatgtaacttttaatatctcattgtgtttaacattaattaaatagccttgaaaaacattaatgaaatatatttaaatattaaataacataaaatgctttattttttttaattaattaatgctaaaaatactattgatttcattttatataaaatatttcacaaccattgaatgtatcaattaattactatttttatacagatttatcaattaattactatggaacacctaactagtgatatcaaatttgaattttgatatgtaattatgttaaatatttgtagagaatgttttgtcatttataataattttattcaattcgatcaaaattgttttctacaataatatcaacatcatatttataaatagtttagaatcattacatcaaagagactttgatttgtaaaactctcaataatgtgtgattttagtctctcattgtcatgagagacttataaatataagaagtggaatgaaatgaaagaaaatggaagagaaatggaatgaaacaaattggtcaaagctccgaaagtgattttcttcaacaatcacttccaaggcttcttgctctattcttgtttcccccgctttctatggtttcttctttttgaagtaaaattgaatgttttcttctttttaaatatattcaccaattgattggtcaatcaaaactttcttgtgtgttgggtgcgatgcttgcactgagtgcacatgtccagctagattaagtggcaatgcgctaagccgtaggatgcacgcttgctcgtgacaattgtcttctaatggggtttcttgtgttaagcgagcttgcttggacggagcaattcttactcgttaagcgagaatgtcgcgtcgagcgtgacattttttagttcttcaatccccttccatgcctatgctacatctctacaaaaataacatcaaaattactataaaattattaactttagcatcttctaaataaaaattcaaaaaagttaagttcatgttgttttaacaccaaagtaaggataaaagatatctcaagtgatattaataacaatatttaattgatgaaatatttgggaagttaaaataattaacttagagcaagtttaacactttgttttaaaatttttagctcattaacttagagcaagtttaatatctcattgtgtttaacattaattaaacatccttaaaaacattaattaaagcaaaacactttgtttttaaattttagctcacaacttacaacttttcagttatctttttttgtgtgaaacgaattgaaaaccccataactgataattaaaagccgcaagaaatgtaatagaaattaaaaataagatcatgataagagataattaaaaataattcctaaaatttataatatacaaattgatattgtggatactataggtaaaatataaattaaaaattatttaagacaaatttgtcactaattatgtggatcgactggcatgaaattttagcttgaacaatgatctcggattcgaatgttggtaaaactgcattaaatacttccaactcaaacagacattaagaaaatatttacttgagataaaaatgatttgttattaatatgaaatatatattaaaacaaaaaatacatgcatttaaaattttaaattatgaaatatttggaaggttaaaataactaatgcagagtaagtttaacactaattttaatttcacattgtgtttaacattaattaaacatcattaaaaacattaattaaatatatttgaatattaattaaagtaaaacactttattttaaaaatgttagcttataacttttctgttatcttattttttgtggaatgaaggaaaaacccatatattataataagagataattaaaaataacttctgaaatttatgatatgcaaattgatagtgtagatactatcgggtaaaatataaaacaatataaattaagaattatttaaggaagattcacagccaagcacgtaaatcaaccatggtagtcctacccaactcaaacaactcaaatagagattaagaaatgattcatttgagataaaactgatttgttgttaaatcaaatataaattaaaataaaaaatacatgcatttgaaaatttaaattatgaaatattaggaaatttaatatagttaatgtagagtaagtttaatactactccctatgtatcatgataattgtagtggaagagaaaaaaaatgtcaaaaataattattattttgctttttaatataatattaattatgtttttcatttatatcatttataatataaatgttgaaaaaaaaatctacaaaaatgaattaatgatgatataagattaattttataaaattattattttcttttatctatttgttatttttatttgatctgtgtaaaacaacctggcatgatttttattttaggttggaagtaacttttaataactcattgtgtttaacattagttaaatagccttgaaaaccattaatgaaatatatttaaatattaaataatgtaaagtgctttaattttttgtaattaattaatgctcaaaatacttttttttgatggaaaatgctcaaaaatactattgatttcattttatataaaatatttcacaaccattgaatgtattaattcattactattttttatacagatttatcaattaattactgtggaacgtgatatcaaatttgaattttgatatgctatgttaaatatttatagagaatgttttgccatttataataattttattgaatttgataaaaattattttctacaaggatatatgtgacctataaaaaaattgaaataaaacattttttaaggtggaaaacattttttaaggtggaagagaggttgatatataaaattaaatacacagttaaatatgaatccgatcaatgtgatatataagagaaaactattcttgtttccgatttctgaaaaaagtccaaatataattgaagaaccacaacttttaacattttaagaaataaataaaatattatttatgtttaaagaagaaatcaattataattttactaaattggttaatattagtctaacaataatgaacaatatatgttgaatgatggctatatatacgagggactctcaattttaagaaaagcacatcaatttcttgccctccagaccggccatgctccataattcatctaggaggcacaggttcgtagcattttctcatatctgttttttattcttcttcttcagttattttgatgtttattttttttggtgaattatgcacacttacacaaaaattgaaaggccattttttaatatttttttatgattaaacatatattgtataagaaaatatataatatacactttctcctttatgtcatattcttcagatcatctcattatttttattatatctataattttttatcttcttctctttattattctttctacccgtaaccagccaaaatgggggtgtacatttgtcttgtagcacaattctttgaacctttttctcatttaagatccatatattattatatttacacgtcctcctcaaattaactcccaccgtactatccttttttgaccgtattatctaacgagaagtatagtatagacaatgactttgtttaagtctttcatacgataaaattagtttatatatatatatatatatatatatatatatatatatatatatatatatatatatatatatatatatatatatatatatatatatatatatatctctctctctctctctctgttgtgtgtgtgtgtggtgagacagagtgtgagtgacacgagcgcgcgcgcgcgcgcgcgcgcgcgcgtgcgtgtgtgagagacagacagagagagagnnnnnnnnnnnnnnnnnnnnnnnnnnnnnnnnnnnnnnnnnnnnnnnnnnnnnnnnnnnnnnnnnnnnnnnnnnnnnnnnnnnnnnnnnnnnnnnnnnnnagaaagaaaaaagagcaaaaagaagaataaacaacgagaaaaacacacgatagtagaaatagagagataggaaataatataaataatgaatatctgtttcaaattaattttcggataaatttttttaattcttttctctcccaatacaataaaaaaatcattttttatatattttgctttaacttatttaaaaaagttaattttaacacatacataagttaactttaatttatgagagaagcttacttctttttatatttttatgatgaaaaaatataataaattagttatatatatatatatatatatgaaagagtttttaaaatatccaaattcaatgaatagatttgcttaaatgatatcacaaactttgaatttcatatataggaaagagcttttgtttggaaaattagttccaccacgatattttcaacttaaataagttttttctcaaaaaaaggcacttataatcataaaaaatacaagaattcgtaataatacttgaaataaaaacatatatatttttataatatcaagcgtggttactgaaatttaattttattcttatctatcagttagtcgaaaacaaaacaaaaaagaataataattttctatcttaattttattattcgttaattatgtggaatcatgaacattattttacttattttattgtcagtgattcagtgccagcgttgtagtagtcgctcgctagtgcttattgtgaagaagaaaatagaattacgttcgccaagaaatcataggatagttaatttagctgcatatataaatcaggtacgtattaggtcatctatctcttactatgtactttttttaattattaatcttactatgtggagtaattttgtttctgtatttcatgtgtgtattaatagtacctaaaaattttataattaaatattttggactagatccataccatattctacaccttccagctgaattaaaaatttgagtaatttccttttacggcaaaaggattgacttttagtccgtggtcaatccatcaccgtgctgtctcaagacggatttttttattaaaattaaaacggtagattttgcttttaaagttgttgaaatattatatattaaaaggattttactcgtataaatcgactttcacagtcaattttgattttgtaaaatcaatttctgacaacttttacacattataacatggttgaaaatgctataaaaaaaatttgtcatgaaaagcccgttagaaattggttttggaaaactttacatcatgtaggtaacttttttaagaaatattttatactttaataattttaaattaaagcaaaatatttccgttttacatatataaaaaagagtaaattacacacattgagatttgacgaaattatacaaatctcattcatttttaaagcctgaaaacagaagagtttcttgtgtaattttatcaaattttaagaaaaactgtaatttattctatatatataaaaaaaaacctaacaagagataaggatgttatcttatcgaataaacataagaaattattttagcaaattaagacccaccctagataactctccttagttgtgtattcccctaagaaataaaaagtgtattatacacaaacattttactaatatttttaatttttttatttctatcacaatataaatcctatcatattaattttttttctccctctaagtaaattatagtataatagatgtagatgaaacatttctcctttgaaaattagtccgctatgttccaagtccatttgccattgcctatttcttaaaaaacgtcaaaatattttgacgtgtgctaactgtcaagtgtcgatgcttttccatgccttatcacttgtcctctatctcttctactatgattccttgactctttctaactaacaaaacatgctactttatacttggctgaattttctccatttcttgtttcgtgtgtaatagtttacattttaaaaaaccaattttcttataattaacaaatcttttaagtgaaaactagtcatatataaaaattagtggtcttattttatattttctatacccgcaataatttatctaaaattaagttaatatgcaaattcaaattaattttaaacaacacttttaaaaaatttaaaactaatcaatatattgttgttgtaatttaggctataaaaacgtattataaatgggaatttcagcacaagatgtgcttgaacctcaaaacagaaaaggctgatacatgatgaggcttctaaaagcagcccaccccccataaaaccaatatatcccgaacaacagagctttggtaactaaaaactggtcggattatttcatgaacccatcccttaaaacagaaagtacttcccatcccttgaataataataaataaataaaaactgcaatggccataagaatacgaaaaaagctttcttagagcttattaacaaactccttttgacaagttttttttatccataaatattaattattagtattattagtttttgttaataaaagagattgaatatatatatatatatatatatatattcattttaattattcaattcaccttatatttttttcaagctttattgagactgatttatctgatgcagcaaaacataagatacccaaaaaccttggttccaaaacaataatcatgaatatattattgtaaaatgtatataactaattttgattactatagtttaccaaacgctttctaatgccaaataagccaagatatatcgaaaaggaaatggcattattggctgctgtcccactttgatctattggtcaatagtcataattccaagaagtatttaatacaacctcctaggtacacagggtgaaaatataatagagtagaaaacattagtggttgagtttaattttaagttacctgaacataggatatattatatatatagggtattgtcgagtattaactaatatgcatgcaggttgatatattgactgctacgaactatcgtatgggaagcttgggtaggcaagaatttagattcgcttttttccaatataggttctgattttgaaactggggcaggttcaaatttgtaggcttttcttacctataattaaagtaggggattgaaattaaattttaaaaccaaatagatttttctaatataggtcttcttacgtttgccataccttaatatatacgataccgtgtagacttgagaagaataagaagtgggtcatttaattctaataatgactacatatgcatgttgactattttctaatactaaggattaggtatgtaccaaacgctcctattttacttgttggaatataattagctaggctagaagtttttcggttttaattatatcaattgaaaaattgatacaactccacgaatttaattgtacgtacgccgtcgttttggtataacgacacgaaagcccttaacaaaaacgtatattaattcactatcaatgaaaacaaaaatttagtcaattgttgttaactgagtaatagctgttgtcaagtgtttatcgatatttaaaaaggttgctgttaggactaaaatataggcatctattttgatcaaatacaaacttgaatttcgcaaattaatttagcaaatgattttgcaacatatctcaaagtctgccattttattataaagtcgagtttttagtgtcaagaatgaagacatctctcatcatactttttttatgatgtgtctttcacacttttttcttataattttaaatatattttattttaaagttttattaaattagaaaataccagaacaaatacatgttaattttttcataatgctaaattcaatgttatcctcttaattcattcgaccatataatacaaccttttcccaaattcatcctcttcattctttctttaaagacatatatacccttcacgtggaccttaattagtccaacgttgaaagtaacacttgctgagttgctgtcgtgtgagaaattacgaaaattgaggggcagcgccaaaaataggaaaaagaaatgtagaaagcagtacttggaaaaagtgacaaccatcatcatagataagctaaagctgttcattgagcagtacttatatgcatatataaggtcattcacttcccgcaactttctttgaaggtgcttattaatgttccaaagaaaaaatagctatcatcaactgttcatctcctacgtatatatggttttctgtaactctattagggtctttctgggaaagacattggagaatgtcaaggtttgtacgtgtcctttagaaattatacattaggttaatttagttctcttttttttgtcatttatgtatgtcttcagtttttttcactaacagcattatcaaagttcattttgccataatattcttctgttccttgtcacctgaaatgaagcttcaactcttcaaagttatttgcaggttcatattattggtaaaagatgaaggtggaaagggtttcaatattccagtggtgggttagagtagctgtgcagctcagcttaatcttgcttggtgccttttctgatagagtctcatcaattaggttctttctactctcttaattgcttctctgtttagttacatgccaatgttgcttttgtcctatgcttttcttattgtgattctgagtaaacgaaatgaaatcatgagatgagaaaatgcatcaattcagaaggaagacatatcctataaattagtacttactacaagtaaataatacttttaagtcttatttttttgtctcttgtcccgtttatagatgagaactttaaaatttcatatccttcatttatctcactatataaatactccattgtgcaagctacttttcacttgcatcttttactttagttgcaagctactaagctagccattgtggcaatgaaaagagtttatttccacgtctttgactttctcatgtgtctcatttatgttttcacaacatttagtcttagccgtttttcacctgcaccattctttctttgacggtctcaaatgtttcgtttatgttttaattttgcaatatttagtctacgcatagatggcctgtatttaatgacgcaaaatttgatgaaaatgcaattaactctaacatttcttaactaattagtctctgcaagtgctttgctctaaccgacaatgcatcaaatagtataggctgatggtctacttcagtaacaaccgaatctccctttcaaaacacgacaataatttaaatacacctaaaattgaagcttgctatttacattttttattttatttcaagtcacttttacatatatatatatatatatatatatatatatatatatatatatatatatatatatatatatatattacacaccaatcatttttcatataaaatagatgacaacatttaattaaatgtttttccaattatctctcttattagacagtgtgagaacttattagataattttgatcatataaatgtacagtctagtaagaatcagatttaaataaaaagaatttaattatttatatataattaaaattaattacttttaccttttactccatagatataaccatgtacatacacatatgtgtggagcggctttacattaaatatgatgagcaaagataggtggacgtaaatcattctatcaaaattgaaccataaaactttttaagttgccaaactgtctaagagtaactgcccttcacattaaatcacattaaatctcacattatcaatatattcaaattaaactactgtcctgtcgttgataggagtagtttaatttgaatatactataatgtgatttttatattattattttattataaattatatatatgaaaaagttattaatttttgtaataattattttttaaattatatatacaataatttgttgataggagtagtttaatttgaatatactataatgtgatttttatattattattttattataaattatatatatgaaaaagttattaatttttgtaataattattttttaaattatatatacaataatttaatacaactaaaatataaaggctaaatatttctttatcttcctatttcttttcccttttgaagttgcaaccaatgggctaaatattttctttatcttcctatttctttctcttcaatttctttttaaatcaaatgatgaaggcaattgtatttgattcctattccaatagctaggtcccctgaaaataatcggatttttaaaagaggaataggaggaattattattaagcactatagtacaattaagaaaaaaaaaaaaaagagccgcatgctagaattaaatatcaaattatattattaatattatatacatattttatattgtttttataataatattttacatttacttttcttttttacatcactctttattttatatttttatttcttataaaaagttgtgcataaatattgagcaactatgcatttagtctcaagctgtagtatcctattgtccatttgttctatttttttttttcaattttgaatattgtcaaatgacaacgtcacacgttgagtacttttttatttttaactatcttctttaattttctgcaatgcttccacttgcagaagcgtttcgacgtctcctccagtaaagctgaataccgaaaatcctcaccaggtgatataccggttaattttttggagaacaatataattcgttcaaaatattgaaacaataaaataaataaccatattaattggcctgtttttctcgtcaaattaaagcttgggttatactaagtctcgacttgatttgcaggtggtgattagcaacggcatcgtttccctcaatttgtcaaagcccgagggccatatcattggaatatataatggaattaacaatttacttgagccaaaaaataaagaagacgatagagggtatatatacctatcacctacttcttattaaataaaaagttaaattttcttataattttatcattcttatatatttatattttaattcttttttactctagttcttataattttatcattcttatatgtttatattttaattcttttttattctatataatttaaaagtattttttttaatccttataatttgtatttaattatcttttagtttctatagtttaaaaataatatttttaatcccaataatttatattttaattaccttttaattcttactaaaaaaaatataaaaaaaattaaaataaaattaaaaaaatcacttttaaagactaaaaaaataagaatcgtaaaattatagaaaacaaatgagtaatttaacctaaataaaattatacatttaggtcaggattatcttcaaagtaatccggtatacgatggcaaaaaaattgaatccatataagatctgctttgattgatataatctgccttcatatttataggtacttggacgtcgtttggaacgaaccaggaaaacctggcatatttgagaggtatatatatttcagaaattattaatttaggcctttttttttcttttatctccttttcattctattttgtttatttttatggcaaatattgaacctacctcacttttatataaggtgtatgggtggaaagatgagagagataaaaaaaaacacttagagaaaaaaaatgataaatatgataaattatgtaatggaaaatagagagataataaaaatagggtagaagtaattaatgcatgttttatgcaattcaagagacaaatttacgatttaaactgtactgcagaatcgatgggacacatttctcagtcattgcagcaaacgagaatatagttgaaatttcatttttaagaacatggacagcttccatgaaaggctcaagtgtccctatgaacatagacaaaaggtggattccaaaccttaatttttttctacagtttgaaagcaaatacagaattagctcatcgacattgtgtgatataattttttttcacgcaggtatatattgcgaagaggtgattatgggttttattcatacgcaatatttaatcgaccttcaggattacctgcggtggaggtttatcaaattaggattgttttcaaactcgacgaagccaggtaagtgaaaaaatgttaattacttttagaaaagttaaaagaaaaaaaaacactttcctttgattttgaaaaaaagttagtactttttcattgactcctgaatgaaaattttcataatttgatagaataaaaaatgaaaatatgaaatggcttaaagaaaagtttcctaaattattattccttccgtctcccaagataatcatggtcttaaatatcgaaaaacaagtaataaatagttaaaagacatgaaaggaatcagaaactttacaaaattaatcttacattattattataaaaaactcgtacccgcccagaggctcttcgctatgcgaaggtatgggggagggatgttgtacgcagccttatccttgcatatgcaaagagactatttccgaattcgaacccatgaccaacaagtcaccaaggcacaactttactgctacaccagggctcgccctctatcttacgttattattatgattaatttatttttagattttgtagtttaatgttaatatataaaaatataagtgaaaaaaaaataatataatattggaaatatatattcttttaaaatacaatttagtttgtggttatcattttaaaagtagaagaataacaaaaacctatgcttaactaataaacaaccaatgatccaggttccactacatggccatatctgatactaggcaaaggaacatgccatctatgagagatagattatcgggtcaaagcctggcgtatcctgaagctgttcttttaacccatgcatctgagccacaatttaagggagaggtaacccttttttgcctgttgttcgaattgacattgattattgttgtttataatgtttatgacatgtacttgtttgttattttgttcggtttaggtggatgacaaataccaatactcgagtgagaacaaagataacactgttcatggctggattacccaggatgattcagcacccgtgggcttctggttgataacacccagtaatgagttccgccatgctgggcccattaagcaagaccttacctctcatgttggcccaactactctttccgtaggttcaacctgtgacctcataaagcatgaataagtcttgattaatggaaccgttcggtagagtaaaaaaaaaatggaatgaaaatttaaaattaaaatagaatgtaaaaatatgggattaatctcattttactgttcatttttcttttctgttctctttcaactcaaagaacggacctgtgttgtctaatatattagaagccctctatttaatattgaacatgtatagtatgttcatgcatcaatactatgttaaacaaagatatgcctgtaaaaataaaatcaaaaaactaaattagagtgcactcaaaagtaatgcctccttaagaatttcttctcatcacctaacacaaatttataacttcagaacataggcctaaacaaaatttagaatttagatagttacggctagaatgccagttgttattcacaaatcacagaaccgaataagtgaaaattaaagtacttcactatttctaaatttattgttgttgttcgtgtttagatgtttgtgagcactcattatgctggcaaggaggtagccatggtatttggtgaaggggagacatataaaaaggtttttggcccagtttttgtctaccttaactctgttcccaacaaatctcagtttcggtctctctggtcagatgctgtagaacaggtatatacttattacccttaactgcactcgctagtgataatttattatacattatttgagcgaggtgattatgttgtgacacaatatattattgttctttggtaaattagttatcgaatgaagtaagaagatggccttatgatttcgttggatcaaaagatttccttccacccaatcaacgaggaacagtgacaggacgactactagtcctagatgggtatatgcatatgccttatttaccttcattttattctttgatgacatagtatcaacttatatagaaacaagctaataaattccatgctttaacttgtttatcaggggaaagagagctcaacctgctaacaatgcttatgttggtctagctttgccaggagatgcaggatcatggcagagagaaagcaaggtgcatttggtttaggagccaattggatttaatttcttgaaatttcaagtttcaagggctagtgacacattcagctaaaaagggtctgaaatttgaattatatgtgccattcacagggttatcaattctggattcaagctgacaaagatggacacttcttgattcaaaatattgttcctggggattacaacttgtatgcatgggttccgggttttattggagattatagatatcaaactaaaattaccatcaaaccaggtaaaatatcttcgtctctcatgttaaatataaagtagtttatgtgcttttatatatgcaacaacttcagctttttgagtaattgattcatgacatggaattagaactatgtgactaattagcagtcatgatcagttccatttttattggcatcatatcaggatataatactataaattacaaactcgtgcattgttaaatgtttaatcatgaactatttaaatattaaactatttgagcttttgcacttataataatttgaactttttagaaatttagtttatagcttgcgtcattagacaatgacttgtatataatgtacctttaggatgcaacatcaacttgaattcactggtttataaccctccaagaaatggtcctactctatgggaaattgggatcccagatcgctcagctgcagaattctatataccagaccctaaccccaagttcacgaacagattattccagaacgatagccaagacaagttagcccaaaacccattttcaacaattaatgttttcgatcttctattaatatgctcttttttcattttctcaaactatttcttctatggcaggtttaggcaatacggcttgtgggaacgttacactgaactatatccaaaccatgatctcgtttacactgttggtgtatctgactatcacaatgactggttttatgctcaagttaccaggtatttgttttttttggtcaatatatagaatttgttataattgtcaagcatttttagttttctcctctaaaatgcactaatgtatgcaggagcacaccagaaaagacattcgtgccaacgacatggcaaattcaattccaacttaaaaatatcataatgccaggaaattacacattacaagtggggttggcatccgccaataatgctagactggaggtacaccaattcattttttccataattgatcttcttttttttttcagttatgagtatgactatggtggcaattggctaacatttttttatatgggtgatcaggttaggttcaatgaccagaatgctaagcttccccacttctcaacagggctaacaggcgatgacaatgccatagcaagacatggaattcatggattgtataggttgtatactatagctgtaggcagcaatcatttggtgaaaggaaaaaacaccatctatttgacacagtcaaaaggcataggtcctttcatgggacttatgtatgattatgtccgcttagaaagtccaccaattaaaagtacttgattgagccgagaacatgtacgtagtggaggaagataaataagcgtgactctgtctctgtgcattatgaatctctcatcttgcaatttgcatagaagcatgcatgcatagcagaatttttgctagaaagtagaaattatgatgaaagtataaagccagtattttttatttattgattgattttaagtttgtactactgtggagggcttgtaatttggtgtcggataattataagaaggaacatgctttctgttgcgaattcgtaccgcacgaattctaaatatagttcataatccatgatttccgttaattatccttttattttgaaatttacatattcgccaattacattataacagctgtttcgtaagaaaattcgcagcatgatctctcctgaaatttaacactactataagaatatgtattgtatgtaacattgtaaaaggattttaaatttatttctaatcacaaattgaatgcacagtactaagttttatagtttaacaattgctttgtctattttaattttaaccttttaattaagtaagaaatataaaacaaattaagaattaaatctcaatataaaaaaacttaagagaattatataaaatatttaaaattcgtaaaatacaaagacttaaaaaaaagataagaatgaaattcaaaattttaaaattgtgaattttttttatcactttcttgatttgttgtccttttatgttgttttttattatgctaattgacatatttttacttattctatttttttaaattattgacttaaaagttaaaacgatttcttactcttgattttttttaattatctgaatcaatgactttcttagttcccatcaaacggctagtcccatctaattataaaaactacgattattacctttgaagataaaaaaaataatattataaaaattaaaatggaattttttaatgttcaatgattgactattaaggaatattggctattacttttttgaataataattatttcaataatttagatctagaattaatgttcaatggatttaaattagtgagtgcaatttttttaaaatattttccattctgcattactaaattattaaaagaatgtacgtaacgcacacaactactctatctttattttttcagcagcgtaccaactaactattttggatgtaatactggattcaaatctagtttcttatgaaattatctttcgatgattatcatatggaccaagaacgtttgtatgtaccaactaattattgaagaaaaatacatagaatgtgaattaaattttaagatcattcagtaatccattaaaaattaaattgatgccacgttttcttctttgttctccctttaacaacaaaaatgaaaagaaaaaaagaactttcattttattatttcatgacaatttggttcaaccaaaaaatattaacttaaatatattttaagttcctcaaactcaaatgctgaaatttatttagtctcccaaatttaaacatgtattttttatttcatcaaagttggaaaagggtttttatagtaggtaaggtaaaggggtaggtcagagtcgggttttgcttaccccacccccaactctccattttcttccgtccccatccccatccccgaaattcgataggggtgtagatttatccccattcctactttcgataggattagatttttcccgcctcgatatgcttataaaatcctataaaaaaatataatttttcatagaatgaaaaaaataactttaaatagcaatcacaacatatttttagattatacatgacaacataaaatttaatccaaaaatagcataagattcaatccaatagtttaaggttttaatatattatatatatgcaagaatatttttgtaaattaattattagcggaacgaatttgaggatgggttcggatcaggtattaataatctcatccctgaccacaaaactttaattgtctcaaaaaaatccaaacccaacccctaccttgattaacttggattttttccttcaaaatcaagatgagtccgagacgacctcattgccttgcctatcttatagttcttctgtcaagatggcattaacaggttgtgtgaagtgacagaatgtttcacagtttatgggggtttatatagctactagaatttgattttgaatttttaatcaatttctagtggtgcaaaccgctagaatcaattaaaattaaagaaaaaaataggacaagagaacactgccaaccacaactccataactttgttgcgatgtttttgacccctttctctctctgataatatgttcaccctcttttgtattgattggtgttcatacattaagtgtccaattaattattgttttaagaatagggttggaggcatgagtgaaggagggagaggtagaggcagtcagggtcaagggaatggtggtgcatgtcgtgaaatttagaaagagaaaggtgattttgtgagagtttacccccttacacacagagctacagagggtcttattgtgtcaacaccggaaccaccttgagtcaatgttgtaggggtagtgcaggtcgtggcagcacttaaattcattctcgaagtaggtattgcaaaagcgctcctccactttctcgatctcgtcaagtcttctgaatgagccactctcaatcccgtagagcacaagtccaaatttttgaaaggtgctacggtggggaatgggattaaaaggaaagggctccaaatcgtgatcatgagtgatgcagggttgattgcaaaaacaatactgtggaaatgtttggtaggattgactttgtggaatctgtttagggttttatgatttcacaagggagttttgaattgtgaatctaaaaaacaaatttatgtaaatttggaaattgggattttgggatgcatttgtgtttgaatcaggaatttcaaaattttaaggcatttgaaatgcctagaatttgaattgctttgattttaatttccttcatttttcaaatttctcctattttaaattctttgtttggatatgacaatttaatttcttttatatgcaaaatttttattttatattttaaataaatgaaattttaatattaaactttatagaaaataaacacaatctaattttgaaatattaattaaaaaatatttttaatttttaataatttataaatacaaaatattgataattttaactaggagtgttttgcctaaccacaaccagtgatgtttttaaaccgacatcaaccaaggctatttttcggtcaacatcaaataggattttttttgtcaaagtatgccagaaatatttgtcagctgacattagtttgggctattttttgactaacgttggttgagtctatttttcagccgatgttggctaggtttttttaccaacgccggctagggtttgtttggccgacaccggctagggtctttttgaacaacattgagcaaggctatttttagtcaacgtcggcctaaaaaatcccagcaggcgttgacaaaaaaatctacctaatatcggctaaaaaatagtttggtcgatgtcgaccaatagaacttacctgatgtcggctgaaaaacatcattggtcaacgttggccgaaaaatccatagtcgaagttggctaaaaaataggtctgaccaatgtcagacaaaaaaccctacccaacatcggttataaaatagtcttggctgatgttggcaaaaatatagttctgaccgatgtcgaccgaaaaaactctagtgaatgtcgactgtaagaacctagtcgatgtcaattaaaaatagtcatgtccgatgtcagtcaaaaatacctagctagtgttagcaggaaaaaaccctagccaacatcaaccaaaaaacctaactaatgtggttaagaaatagctctgactgatgtcaactagaaaaccctagtagatgtcagcaaaaaaattctaaccgacgtcagctaagaaaatctagttgacataagccaaaaaaccctagctaacatcagttaaaaaataaccctagtcgatattggctaaaaaataactttggctgatgttggctagaaaaacctagctaacgtcggctgaaaaactctaacaggtgtctactcaaaagttaatcatgaccgatgtcaatagaaaaaatctaaccaacgtcggccaaaaaatcattggtcaacatcaactaaaaaaacttgaatgacaacgaccaaaaaaatctttggtcgacgttaacaaaaatttcccatgactgacgtcagtgagaaaataaccctaaccaacatcatctaaaaaaaatcttagctgatatcgacaaaaaataattttggttgacatcatacaaaaaaattatgaccgaaaaaatctcgaccaacgtcagtgaaaaacaacttacgtcgatatcgaccgtaaaatctttggtcacccgtaattgtgagtgttgagcaagaaagagtcgcgagcaagaacctgagttagagtgaacatcttcaaaaaaagaatttcaaattctatatttttttagaaaatttgaaatatcactgttttattcaatcaaaatgattcataaaaataccaaaaatttaatctcatttcaaatattttatccaaacaaattattttattatgaattattttaaattccttgaaaaaatgaattctcctgttaaattgtttcatccaaacacattattagtttttttttctttattagattctataaattgtgtttgatgtttaaaatttctaaaatcaattcctcgtgcctaaaactaccacaaattgcaaaacatgctttagttacacatctcattaatgccatattgaggaaagaattaaaaaaaagtattttttttttcactttgaagaactaaaaaattacagttctgaatttgggagactaaaagaatttgatctcatatttcaaacatatttaaaccaaaaatgtttaatagaaactatttcttgccaacaatcaaaataattaaaaacatttaacatgttcataatctcacacaatttcactctttaaaatgtatatatagtacaaaacaattttcgtcccaaagggattataaccaagcttaagcaattgcacaccccacacttaattgcttatttatcaaggaatagcgtagctaaatccttgaaacaaaaactcattacggaaaacacatataatgcttaaagaaattattatcaattctcaatctttatctcttgccccatgtacgttcagtatctgaagtctgaatcacgcatgcatatttctttatttactcaagagcttggcttcaacgtgtttccaatgtcaattacaaatcgatatttcacatctgctttggcgaggcgctctattgcagtgttcacataatctatgggaataacctcaatatcaggcttcactccatgcttagcagcaaaatcaatcatttcttgcgtctctttcatccctccgatgctactgccaccaaccattttcctccctgccaatcaattatgtggagtaagtttcaaaattcaatttcaaccttaaagtcattgagtacacttttgttctaagacacacatgcatgcagttctattatcaagttttaaaaaacagtccacgaccttaagtttgaccgcaacatcaagatttttatagtcatcgaaaccagttgcatcggccacattgatcacaatttcttgcaatgacatcaaggaacacaacaaaatcataaacagcaactgctatactaaaaagtgcatagtttatggcattgttttttatatgtgcttacccataagtaaagaaaatactggcaactccaaaggcttctctggtgcaccaaccatgactagtttaccatgaggcttcaacaggccaatcaaaggcacaagaggatggacagcagaaactgtgtcaatgataccatccatggttcccattacagcctacatagacatttggtgaagaacattagaataagttgatgattgattatttcttgtaaggaaagttttaattttcaacaagaagcaaatttataactcgcagtacaataaaaattaaaactagtcacaaaacaatttatatataatttctataaaaatgttgtcaccataatttttgtgatgctactatatattaatataaaaaagaaattttttatgactaaatttagtcactaatatattactttttagacaaagtatatttttagtttttgtgttctcggtaaaagttaatattaatgctcatattttaactttaattaatttgatttttgaattttagaaatatggtgttttcatctcccaacaacattgacagttttcactgtgagaagagacgaaaaccatccttattttaaaagttcaaagatgaaattgtttaaaattgaagctttgaggactaaaaacaagtttcactaaaaatacagatattgaaaaaatattttcctcataatttcttgtattggcgtacctgcatctgatcttgttcacggctaaccacaaatgagtcagctcctatgttctcaatggcttccttctttttgttaggagatgtgctaatcactgtgacattagctccaagagctttggcaaacttgacagccatgtgaccaagtccaccaagaccaaccacaccaagattcagaccaggcttgtcaagtccatagtatctcaaagggctatacacagtgatcccagcacagaggagaggagcagcagcatcaagtggtaggttatccggaattctaaccacaaagtgttcatccgcaaccatcaagtcagagtagcctccatgtgttatggtgccatcaaaatacttgacaccgtatgtgagaatcattttggggcagtaattctcaagattttcatcacagctttcacatgaacgacaggatccaatcatgcaccccacacctacccggtctccaactttgaacttttgcaccttgcttccaacttctgttaccacaccagcaatctcgtgcctatacgcatgttcaaatcgaatttaacttgttacataatgaattgccattgtaaatgatttacaaactttgaagcataatgcgtggttgaattgggtattattattaatttaaacttcaatttagaatagcttattagagtgtttttaataaaaaaaaaattacagttttattaaaatcgattacaggtggagaaaaaaatctgcaaggttgcaaatgctggaaaactgatcttttttttccaatttaagtaaacttttaaattagtccttaacacaacacagatcaagcattttaaaaaatcttaaaagttaaaacccactaggctcggcttaatgacatgaaatttagctagttaatttacatgaggttttatattcaaatatcaactgttatcattgtcgcttgcgtttatttcttttttgtacaaattaatggtggaaagtaatgaatgctttttttatatatagaatcaataattaacatatttaattttttataaaatattttttattttattttaaaaaagagtttttagttttttttttaagaaaaaactaaaaaacgtatttgattcttgttttcacgtagctatttttaaaaagtatttccaaaatatgggttttgtgcaaaactatttccaaaaacaaaatatttcatttttatgcaaaaataatggtggaaagtaaaatcaataaccaaggaaagatttttaaaacttcggaaactaaaatatttaacccatataaatttgagaactaattaaaaaatttgctcattctaattcttatttacataaagcaaagtcatagggaaaatttgacacaatcaagaaagaagggaggatcaattagggactgtttgatttttatttaaaaaaaatagaatttaaaaacaaaaaaaacatatttcattattgttttctcgttgctattttaaaaactatttccaaaatattgattttgaaaactataaaaggaaaacatcttttcagacaaaaaaaaaacacagtgtctcagaagtaaataactatatttattgcccgttactttgtaacaataccatcatttgaatgtcggtctctcacacagaaaccactaaaataagtggacaaaaactcgtcactttatataatttatttccttcattcgattttcaaaaactgatcttaaaccaattttgaaaacagctttaaaaaaaattcaaaactgaaaaccggaacaaaatcaaacaagaccttagtatcttttataatttaaaggagtgatttttttttctcaaaaattttgtaacttatatttacctcttcccattgtattgttattgttatcttatttcacgttttttcccttctctttttgtgagaaggtaatactttattctttaaaataaaatcaacgtgcaaagcatgtgattagtatacgtacgatcgcaacacaataatgtcagaaacgtagaaaaagaaaaactcatgtttattattgacatacccaggaaccagaggataggttgtgttgccccactcgttctttaacatatgtagatctgagtggcatattccacagtattgcactttgaataccaaatctttctcccccgtttctctgtaaaaattcccatcaaaactcagttaaatatatcattaacaagatgcttatttaatgattttgacacctaagaaatcaaatatcaatggatttttcttttgtcaaatttaacttattatattcaaattctatatatatttaggatcgagataaatataagatttgaacataatgtttctataaactatttagttggtcctttaattatatagaattttttaagtaggtctccagactatttttttaaaattaggttatttattatgtaattttaattgagtctttactctttacaaatttaaaactgttataaattattattattattatgtaaaaaataattgtttcaaactgtcatatatagtctaacattactggtcttactatcttcgtcctataagaattaataagtgacattactatattagtgtactattagaagaaaaataaatcctaaaataagtatcattataagttttcaatttaatattcatttttttgcagtaaaaaatatgatatttattattttttaactacacctctaataatattttttagaaggtttttttgttgcatcatttttaacaaagaaggccaagaagattaattttataaaattaatatactcttttatttatttattaatttttcttattttatgtattaaaaaacttaaataaactgacacttttttttagaggagatcaattggcacttatgaaacaggagaatttttattttattttttaagtttagagatccaattaaaaaatcagttcatggacctagttgaaattttctaaataatttagtaaccagcaaaataattgaacctaaataaagagataaattctccctggaaaacaaaagaaaaataaatcaatgaaaagagttttaaaatatgagaatacaaggaatcgttggatcatgcatcgccaccccatttcacgaaggaaaagggcatttacagttaccgaaaaggaagagatgagtggagagtgcaccttctggagaagttgaatggggagagaagcccagatgagtcccgagcagcccaaccaaaaaccttctttggatgctccatctctggttgtgacgacgccattttagttgcaaagataaatatgatgattgattaaagtatgcatgagtatgagagagtgagagtgtgaacattgcacttaatgcttccaacagtgcaagtgcttgcacgagaaaagtgacaagggtcaaaccatgttcttaacgagtggtgccaagtgccaacatgtgtcaataagtaatttgttgaggctgaggtgtttgttgcgtagctaacagtgaggcaaataatggaaaggaaaggacaacccaatgcactagtttttttttcatttatggtatgttggacagactcaaataagaacaaattagatttaaatatatatttttctgataatttagtgtttttttatttttttaaaaaaatattttaattcttataaaatgtatttattttattttttatatataaaatgttttagataatatttttttgctgttcaattttttttactatttaaagtattatttaaagcgcttaatacattttgaattaagatgaaaattataagaaaaaaagactaaattatatgagaaaaaatatatttaagataatgaattaaaataaaatgtaaaagtgagtttgataatgcgtatgagagcctatatctatcactagaggtaggtggaatggggtctctcacctgctttttgcatatgacattttcctcttttacaaagctagggaggtcaattcagtatgattagcaacaccctccagaccttttttttgctgaatatggtattttaaggttaatgtccgtaagttcaaattcatttgtaaaggatattattttatttttaggatttatttagatttaaagatatattacctgtaaattaagaatttatgatgttaaatatataaatagagacatttaagatgagaagaatgccacaactaaaataggaggtcagcactttaagtgagaagggaggaaccacacacattaaagaaatttagatagaaccacattaacaaaataatttataaaaataagaactctgttaagtagtgtgtagtataaaagcttagtgtgattagtttgattagtaagtggacaactactataagtagtgtgtaataacattctgttaaatagttaatgagaataagtcattctttcctcatctatgttagcattccatctttctctctcagctctctctctttagttttcctaacaaagtggtatcaagagccaaatcaagatccatctgtgatctgtgaccatggcccagaaaagctcagccatctctctccccacaaccctcctcatcctcgacagcaagaactggagccgatggtgcatccagatgcgcgtgattcttgggtatcaggaggttctggagattgtggaggagggattcccagcgctcggcgaagcacccaccgttgcagaacgcaccaccttcaaggagaacaagaagcgggactgcaaggcgatgtacatccttcatcaatgcgtagatgaagcccattttgagaagatcgctgaggcatccagtgctcatgcagcttgggaaatcctggaaacggcgaatgagggagtggcgaaggttaagaaggtgaaattgcagacaatgcgacggcaatatgagctgatggcgatggaggactccgagaccattgcagcgttcttcaatcgcgtgcttgtcctcacgaatgcgatgaaggcatacggtgaggaattgaagaccttgccgattgttgagaagatcttgtgctgtttggctccaagatttgaccatgtggttgttgccatggaagaatccgggaaggtggagtccatgacgattgttgcgcttcaaggttctctcgaagctcacgaacaacgcctactagagcgtaccacaggtcaagcttcggatcaagccttacaagcccagtcttcacgaaagaacaattttcaccgcaaaggcaacaataggggcaaagtgaaaggcaaagaatacaagagttcatcaggaaagggttctgggaatcatgaaccctcaaaatctgatcaagagccagctgaatcatcagggcatagaaatgggggaaatcaaaggtatcggtgcaagaagaaagttattgatcgcaagaagctaaggtgttacaattgtaacaagattggtcatttctcctctgagtgtaatgcccctgcccaaggaaatcatcatgatggacatggtggtgatgaagccaatttgctcaaagatgatggcgatcttgatgaagatccttctgtgatgatgatgatgaccaccaattcagattctagcagttcaagaacatggtatttggattctggttgctcgaatcacatgacagggcataggaattggctggtaaattttgatgattcaaaaagaagtgccatttgattagctgacaatagaacaattgctgctcaaggaatgggagatgtcctgatatctaagaaggatggaagcaatgctctcctctcatatgtcttgtttgttccaggtatgaagagtaatttggtgagcattggtcaattggttgaaaaaggatttaaactgaaatgtgaagaaagagttctggagttgtttgatcaacaagggaagagaatgttgaagatcccacttgcccagaacagaacctttcaagtggatctttcagtcactaaatctcagtgtatgtcaactgaaattctggatagtgatacttggctttggcatctcaggctagggcatttgaatttcaaaggaatgaacatgttaagatccaaaggcatggttcgtggtctgccatctattaccattccaaaaaaggtatgtgaaaattgcatctttagcaaacaacctagaagttcattcagcagctttacacactctaggtctcagaatttgttggatgttgtatactttgattgttgtggtccttttgatacaccttcacttgggaacaacaagtactttgtgagctttgttgatgaattcaataggaaattatggttgtatatgctgaagctcaaaagtgaagtgtttgagacttttaaaatatttaaaagtatggttaaaaagcagtcagggagaagcattaaaattctgagaacagatggaggaagagagttttgctctacagagatgtccaattattgcaaggaacatggcattgttcatgagataacagcaccctatactcctcaggataatggtattgctgagaggaggaataggactgtgcttaacatggtgagaatcatgctaagaagcaagcaacttcctcacaaattttggggagaagctgctacaactgatgcctatgttcttaataggtgtccaacacaaatgctcattggcatggtccctgaggaagcctggactagaaggaaatcatctgtgagtcacttcaaagtgtttggatcattgtgtttcaaacatgttcctgaccagagaaggaagaaattggattccaagtcagaggtgatgatttttgttgggtataatcccacaggctcatatagactgtatgatcctaatgcacatcaaattgtgtagcagcagagatgtctatgttgatgaacaaagatcatggaaggattatactgaaaatttcagtgtttcaagaagacaagtgcaactcagttgggataactctgaggtgattaatgatcctgcaaggttcaatcatgatgcatccccagcaggagttagaggaagaccagtaagaaatagacaacaaccagtgagactgcaagattatgagttgtttcctaataatgcagtgactaatgatggtgatttgatccatttagcactccaatctgacatagagtcagtcagctttgatgaagccatcaatagtgaggtatggaggaaagctatgactgaagaaattgaatcaattgaaaggaataagacatgggaattggtggttttacctctgaataagaagcctatttaagtgaaatgggtctacaagaccaaactcaatccagatggcactatatctaagcacaaagctagattagtggctagagggtttcttcaggagcaaggcattgattataaagaggtgtttgcaccagttgccagatttgagacaattagacttattgtggctttagcaaatataaatcattgggatctctggcaattagatgttaagtcatcatttctcaatggtccactagatgaggaagtttacatcatgcaaccacctggatatgagaggaaaggtgaggaagaaaaggtgtttaggctgaagaaggttttatatggattaaagcaagcccctcgagcttggaacaaaaggattgattcctttctcagtcatgtgggctttgttaagtgcactattgaacatggtttatatgtcaagcaagagggagttggagatatcacaatcatttgcttgtatgttgatgatctacttattacaggtagtgatgtgaagttgattgatcgagtcaagaagcagttcagtcaagagtttgaaatgactgacctgggactgctcacttacttcttaggcattgaatttctgaggactgagtgtggaacattcatgctgcaaaggaagtatgtgattgatatgttgaagaagttcaacatgaaaggctgcaattttgtagagaccccagctgatatgaatgtgaagcttgaaagtttcactgaggaggacaaggttgattgcacaatgtacaggcaaattgtggggtgcttaaggtttgtgtgccacacaagacctgacatttcatatagtgtgggagtggtgagtaggttcatgagtgatcctagaaaatctcacttggttgtagccaaaaggatactgaggtatttataaggcactgctagttttggaattctattcccatatcaaaaagagaagttttgtctacaacttgtagcctattcagactcggattggtgtggggacaaggtggataggaggagtacaatgggttatgtattctttctttctggggttccaatctgttggtgctcaaagaagcaggatgtgattgctctttccacatgtgaagcagaatatatttctgcttgtaatgctgcttgtcaggccaattggattacatacttgctggaagaattaaatgtgaagatgagtaggactgtggagttgttggtggacaacaaatctgctatagatttggccaaaaatccaatctcacatggcagaagtaaacacatagaaactaagttccgcttcctgagagatcaagtgaacaatggcaaaattgatttgaagcactgcaagacagacttgcaggtagcagatattatgaccaaggctttgaagattgacaggttcaagatgctcaggaagatgatgtgtgttgttaattctatagatttctgaggtttttttctataagcttttgtactaaggaggagtgttaagtagtgtgtagtataaaagtttagtgtgattagtttgattagtaagtggacaactattataagtagtgtgtaataacattctattaaatagttaatgagaatgagtcattctttcctcatctgtgttagcattccatctttctctctcagctctctctctttagttttcctaacaaactcaaactatgttaaacaaatttacctgatttttttttgtatgatgttacgttctctttagttgtgtgattttttatgtaataaagatggtctttttttttcccaaccggattaagctctcacctcatgcccaaatgagagaattctatcttcatctgatacatagttacaaaattgtgactcaattttatatggaaaatcttaatcggctttgtgtgagagaggtatcttttttatttggtgtatgtgattcaattgaggtaatattactaaacaaatattgatcatgtagagagactttgacaggattggtgtaaaaaaatataagttattataactctactctctctaacacaaacaccatttttaaaaaaagaaaacacaaacaccaatactaagggtaaagagagttaaactcttcaaagagttaataaatacaaagttatattaaaaattataataaaatataggcttaattgtattaaatgacacatttgaacctattatcctacgctttaattaaaactaagggtgagaatcactatgtcacttaagtatatgttagagttgtcaatatgaatatgaatcgtaacttgtgagtcaacttgtcccattacagttcaaggtgagttaagtaggtacagattggctagctttaattctgggtcaaatttgactcatttcacttagctcccaactcacccagtttgaacaaatggtaaactaggttagtttacgattaagagttttttttttatcattacaacttactatatcatgtgattctttcttgtttgtacaaaatcaattcatgataatcaaaagttgatactcatagcatctgcgtattttgaatatcagacatgaagaaagaatgttggatccatatttttttaatttgctccaaacacccacataaaattggaatacaaatgaatttccaaatcattaatacatataaactatgcatgagacacatcatagtaaacctattgatgttctaatttttttgacagcaaaagggataatatatatatatatatatatatatatatatatatatatatatatcttttgtgagaatatttttttatttaaaaataattaataacaatcgtcaagattaaaaataatagtcacattaaaatatttaaaatttcaaattaaaatttaatataaccactaaatacctaaaagattcaccaaacaaatcatatcttaaaatatttaaattatcgttaactcattattatcatcatgattgtcaccaccttcactgttataaacgttatcgtcgtttttgtcatcaccatcatcgatgggaacatgacgatgacagtcatgacagttgatgacggtggtgatgacgatatgaaaaataaaacacacattaatataatattataaaatcaaataaacaacaaatgatactttttaattgtatatttcttaattataatgtaatcattccatatcaaataactttttcttttataaaactacgttgtttaattttttattttttctttcgatactttgcgttactaaaattatgtattattattgatgtaataatttttgtatttgactaaaaaatggcgttattttatatttggataaaaagaacacaataaaaatataatatatatatatatatatataatacatattaaacaaaaaataaaataattatatgaatgtcaattatataatatatctttaattgtataaaatattagctatataaaatgttattaactaggtaataaaaaggatgttgttgtgtaaatacaatctattgatgtcaccacctaaattataaacttttattttccttttgaaacactaataatttaaatatcattcttttgaacacatctttgtcttgttttcattgtaactcttcatattatttattcattgctttaaagtttgttgcaatttaatgatgaagaccggaaatgatattattcacgttacactatcacgtaaatttagaatatgtatttattttaattttgaattttctattccatgctatgttaatgttcttgaatgtttaatccaaaaagatcatccaccaacataccacctattagtatatatacatatgagacatataaggtgagatgagtgttttatcacgagaggattaaataacagttcttaaatcaaaatagaaggttcagatttaattgttaatattaaatgcacatgcatttaatatctctctcgggcgcatttagtattagcaagtagaattacaggtggatttggtagtagagattgctactactaaaagaatatacaatgtttattgttcttccatgtctctttcttttgagttttttttctttaacatttgtgtgtgttgcttattatattttctttcccatgtcgccatttgatcgataaaaatagttttcatcatatatctagaaactagttttttttctttctttcttaaaaaatagactagtttctgttatggtaatttttataagaaaattacaaaaaaaaaaaaaaaaaaaaagataggcagtgcgaagctaaaaaaaagtgtaaattgtatttcccttgggttgtaagttgttgcaaaaaattgcttcctgtacctttccagaatgtgaccaatctagaattacattttggactcatcaatctcgaagtcgaaaaaggtgtaggaaataatttttggtgtaggaagcaacagcctttcccttggtatgggatgtttggggcttgatcctatgttttctactactttctttttctgccatcacttggttgggcttgggccatgttatgttgttggttacacgtgtgatgtgggctcattttatttgactctttgcttgcaaaattgtaaatatgtaactactaataattgatatatttttcttatgtgaagaaactaattgataattaagaaagtaagataattaacagaaatcataaaatacaaaatttgaattgatgtaaaaaatttaaatatggaaatatataaaaatatatttttctaattgatgagattttgttagtcttttcttttggaatctttcattgatctacgctagatgttgtttgatcacagttaagttcatatagttgatctcctttatacaacctacatgtccagttcaaataagctctaatggttttaataaaattttctgtatttgattttttttcaattattactgtttaaatttagttaatatcaaattgtcttgttggtataaacttttttttgtatatttaaatttaaacttcataaatttgaaattttaactcgctaaaattcttatcttttaatatatatatatatatatatatatatatatatatatatatatatatatatatatatatatatatatatatatgttataattattgaaataactattttttatttcaataaatatatttttcattataatttattcttttcaaaagttgagactcatgattttatcattacttaatgataattatatgttaggttagatatatttttatttcctacaaataagatgttcattttttatcccaaaaaataaccattttcttttggtcccttatgtatgaaaatttgtcatgtgtgatccctattttcatcaataaaagaccagagtgagacaaatttttgtgaggcatcagaatgaaataaaagatttaattgacctaggtaaaattgaggttaaacaacccatctttaatgatccatggacaattgtcatgttttaaattctacaccattattatcgtatttaatgctttcattgtttttctctcatgaaacttaaatttcatatataatacacataacatatgtcatacatttttcttttcatacactcttttgttatttttattttattcaatttgcaacgtacaagtataatattttttaaatttatgacattttgatcataattgttaattaaaaaataaaaaatgctatactagtgaaattatagataagattatgaaaattgaaattataacattttgaatatcacttacatgtcatatcatttataaatttaatagataaagaattaaactataactgttaattagaagttaatatatgtaataaatataaaatgctaaatcttaatatttatttacttgattgattataaaaagatatacactttattcactttagataaataattttcatttattttaaaattagaaaaattaaatttattttattaatctgaattacatatgtaaaatcattaaataaggtaataattacattcatggtagaatttaacatggttgtcaaaaccaagagtctacttagattcatgggaactccgtaggctcgactagtaagagtctacttcaaacaaaaataataataaattgcttataatatcatactaattcaacattttaacaatattttaaagcacataaatgcataataaaataaactacaccaagttgcaaacataactacataagtaataaggtcattcagttagaaatagccttagttggtaaggcatggagccgcctttctatttgttatagtatattgaacaatatacttggaacctataagtgtagaatcctatctatgatgtgagttttaatatgccaaagaaaacagaaccaagccactaaccaaaatacaaccaaccaacaactaaatatatcatttgataaggttaataggattgagaatttaggatttggggcgaatcaaccaataagtcaacaacataaccaaccgacaacaatgagttagataataaagaagcttacatggttacaacatagtgggctcgagccttaacttggaagtagcttcgctatgtgtgaactcaaacttgcatgtgatgttttgggtctgaaagaatttgcgacttcttgaaaaattaaagaaccaaatcatgcaatcgaggaacgaattgaagaattggagataaagagggaacaaatgaagcaaaagtgatctgggaggactctatgattttgtttcaaggtcgcacaattgaagacaaaatgacaatcttaaatgctcaaattgacctaaaaagattgcaccaactaatgtcattttagatttttttttgccaacaaactcgtttactcggtctagacttgcgaattagcacgagttagtccaaatctgctaaaaacaaatttggatgtgatttaacccgtgtgaaccaaataaatttttaaaactcttaagaacttacgagttaactttagagttagagaatcatgaaatttaaaactaaaaaattgtctagaattctattggtcattcaagatgggattgtttaaccctatttttatcttggataaattgtttgagagagactaaaaataaatattgtttattttcagagaataaaaatatatttataaatgtataattataaataaatttgacctaaatttaataatatatatccgtacaccctaaataagtttcaatgatgataaattttataccaaattatagattactgtcaaacattaaaatgtgaaaaaggtgatatagttttagccgtggaaattttggtcttcgccatgaatattgttgtaatggaattgaatagtcctgcgaacatagacagcggccatgggtttattaagtacattgaatttactggtcggtatccaattagccggtgacacaaaacaggtacattttgatgggttgtccccatcaatggaatcatgcgtacactcaagaacatgatcagtgggacatggctataacgtgtgtggctctgattagttggtaatgtgaacttcttgaagagtgaatagaaatggaaaagacattcttgtttgtttcttttacaaaaaaatcaaatacttgtgaaagagaaaggttaaccaacacaaggaggctccgagtgtggacagaagtaattttaataaaattagtcatttttttaagtatgtttgtctaatatgtttttacttgaaaataattattttatgcttatttcaaaaaaataaatcctatttatttactaaaaacttatttgttttaaaaaaatttaagtttaaacaaacaagtccaataattaatgcccctccccaatgatttgatttttacagcgtgataaattattgtaaaataaaagtaaaaaaattatattttaatatatgataaaacattgtgcaattaaattatattttttaaataaaaattaattatagattaatctaaaattctgtaatttaatataagaaaatcaacctgactcatgactagacaaagtaattataattaagacaaaataggcttattcttttcttcttttttttcattgcaggtgctaaaaatttggcatcaatcagtggtataatcaaaataatatgtataaatgtgaaatgattctcattttataagtaaaattttgaaattaagttaaatttaaatctaaattttaatcaagacaataataaatcataattatagtcattgttgtaagagtattaactatgattgattaaagattgaaaaaagttgtgtgcagcacgtacgggtgttgttgaatagcttgatgacaagaaaagcagtgcatgcccacaaaaaaataagaaaaagaaaaacagtgcacgattttggttgttgaatactttgaatagcttgattgatgacaagaaactatcaaatctcgtacgtattgcgaatctggtactttcataccaaaataatcctgtctacacgtgatccacaagttttttttaaagagaatttctattgttctcccactaattaactttgggagttttgatactattgattaaaaaaatcaatagttatcaaaagtatattattatctcattattttgatatttaataataattttaaactatagtatttatatttatctatcacactcacttaaagagctctttttattagatcaacgatttatcaatatatttccctgtttaggttgcattatacttttatttctataaatgtagtcttcaaactttaaataaatatgtgcattcatgtaaaaagaaaacaaataaatacgtgcattaattaagaattcatcatattttttgttgttgtaaagttaagagaaactaaatttatatattttgtaaactttgaaaacagattcattaatataaaaatacaaagatcttaattaatcaattagtttgacaaaagaatacagagaataaaacacatctttgttagcccttaaataaaaaaataaaaaaacacacatctctgttagcaagaaatttcagtacgtcactttttggaagtagcttgattggcaacagacacgaagccacattcacttgtattcaagacctcaaggaaaatgcatgcagcttggccactcaaagacgtcgtcaccaaagatgtgaacaatgtcaccaaaccaaacacgtcaatacttgatactgcccttataaatacatcttttgttggcagctcctacatgcacgtattaatttctgtctcatatatattaacccttctgtgctatcctgagagacacacttaattattataatctcttcctcttgtctttgaaatccttttctaattcaaatattatataacgattgaaatggcagcacaagctgaaattgagcatcctaggaaagcattcggatgggcagctagggattcttccggtcttctctcccctttcaatttctgcagaaggttttcctcatctcttcgttcattacatacttatggtgttttattagttttttggtggtagggaggacaaatttcacgaaaagtaattagtcaattttttttagtaaaaattagtcatagaaaaagttgtatttttcttttttttttttcctgaaaacagttctattagtttttcatgaaaatgccaacaacctcatgaaacgactttgttgatttttcaatttttaatcgtacaaagatttggatgggttattaggtaataataataatatggagtaatagctggtggctagttaataataaataatgatcataaaaaataagaaatgtcaaaaatgaagttttgctcactatttaattcacatttgtttcgtcaattttttcagggaacccggtgagaaagatgtggcattcagagtgttgtactgtgggatatgccactcggacctccacagcataaagaacgaatggggtacttccatctatccaatggttcctgggtaagcttcttactattttatactatatagaaaattctcattgtgtagctggaacaaaccagtcacacaaataaaaaaattgttctgtatctcgaacagtacttctgtgcattaaagttcagccgctcttgtttatcaaatatattaaactacaatatcaagcaatataaattcaagatttaattatccttttattcttgtaattgtagcacaactttatattttaatctctatattttaaagcatccaatttttatttctgcaatagtaattttttttatcattttagttcatgctcttaaatattgattaatgtcatttgaaatgaatattacgtgacttatttattcatgttcaactcaaatgatgttagacgactttagatgatgaaatttaacgataaaaaaaaaattgcaactatgccgactaaaacaagatgttttaaattgtagcaactgaaagaaaaagttggtgcaattataaaatccagatggataattaaacttaaattctatttgattctaattagtgtaagaaatggtgcaggcatgaggtagctggtgtagtaacagaggtgggaagcaaagtagagaagttcaaagttggggacaaggttggtgtgggatgcctggttgattcctgccgcacctgccaaaactgttgtgacaatcttgagaattattgtcctcaatctacgttcacatatggtgccaaatatagagatggaaccatcacatatggaggctactctgactcaatggttgctgatgagcattttgtggttcgcattccagatagattaccacttgatgctgctgcacctcttctttgtgctggcatcactgtgtatagccctctcagatattatggacttgacaagcctggtctgcatgtgggtgtggttggtcttggtggactaggccatatggctgtcaagtttgccaaagcttttggtgctaaggtcacagtaataagtacttcaccaaacaaaaaggaagaagcaatacaaaatcttggagctgattcctttctaataagccgggaccaagatcagatgcaggtacttaattatattatgccatccattaatttggaccgtggaaatattaatacacacatttctctcagttatctaatgttgataactttgtaggctgcaatgggtactttggatggtattattgacacagtttctgccgttcatcctctcttacctctcattggtttgctcaagtctcatggaaagcttgtaatggttggtgcaccggagaagcctctggaactgcctgtttttcctttacttgcgggtaagcatgtgaaacatatttccctatgtagaatgcagagcacatgaagcatatatatatatatatatatatatatatatatatatatatatatatatatatatatatatatatatatatatttatcgacaaatgttagttttttttagtggatagaacatgcggcctttctcctctcctcttctcccttaacaacccaatccaccttatatgcccacatgaaagcatatgtgatggttcataaggatagtttagtgcaaaacttaagtagatgtaggcacatgtaaagattaaaatgaagactttgatgctaattaacttaattactatttcacataattggcagggagaaagatagttgctggcactctgattggagggctaatggagacgcaagaaatgattgattttgcagcgaaacacaatgtgaaacctgacattgaagtcattcctatggactatgtcaacacagcaatggagcgcctccttaaagcagatgttaaatatcgatttgttattgatattggaaacacactgaaattctgagaccaagctcttaaatattgcacgatttacatttcagagaacgaaccgtgggcgactagtagatagtaaataacaaaaggggagagagatgtgataactttcaaccctgccacttgtcatggaactattgatttcgatttatattatgtatttttgttaggtcatgtcttgaataatattttttcttttgcatataacctagtttacattgataccatccctcgtattctcaacaatattttaatatttttttaatcgacaaagttatttgttaatttttattaataaaaaaattaaaccttcaattttttcatttttttttcaattactaaatcaatcttataaaaatattctaataacattgtatggaaattatgagaatgaaattcaagcgtaattcaacagcttgatgagttttttttttccttagtaggaaaagaaataaatttcttcttgcagccccttgaacataattaaaacttcgttaaaaaatattgtttataagcaactaaaaattatttctctcaattatttcaaatatccttgtgtatatttaatcttctaaatgccttatttgtttcaatttaaaaataaccttatattttaacttaactataaaaaaatgatggaaatatgaagaggaatggaaggaagatgaatgtgtggacactgaatgactcccaatggttgtcttcttcatcttcctcaagttctaggattctgtattatgtctctcttctcctccccctctttttctcctctttttcacttaaagatcattctaatatcaaattttcacaatttttgtgttaagcgcgagtaagtgactggacgttaaatgccttttcgcatgacttcaaactcttcaaacatctttttcacgttaagcagaatctttccgctaagcgactacagttcactaagcaagtttggtgtctttcaatcccttatttgtatttctacaaaaaaaaaatcacaaaaacagtataaatctaatagtttgggcatttactgcacaaaaacttagaagatactaaaattctaatgattcacacaaaaaaaaatcataaaagaggagaatattaataattcctatatatgttttaattacaaaatctatttatgcatatcagttattaaaataaaaaaaaattaaattatcctaaatgaataaagagatttttttaaagaggaacaaatttagttaaaaaacataaagcatatcaattgtttattttaaatttgattttaatataatttttttataagtattagagaaattaaatttataaaataatataaaaaaataacaaatatatattttaatttttaaacaatattataaacttaaaaggatataaaatgacaactcaaaccctaaacaactactagtataaattaggtgagacgggccagaacgggttgatggttgaattctccttccactcgatcaaattgatagcgagtttggatccgcccattttatcatccctacttttttcctctcccaccaccatcactttcaacatgaacattttgccactctcgtacatggcttctacattttgccaccctcttaagctaactagctaagctttccttttcttccttcatctaaatctgtagttactcaattgagctacgtgccactgctattctccaatcaactatctcactcccagtcccaagtttcaccctcaacaacaacaacaacaatttatttgaatttcgtaaaaattatcattattcactgagtggttatagaaattgtgattccaaccataactatttgataagttgaaaaattaggttagcacgttttgaatgttgtcttccttttgcctcatgatagtcgaaattatctttgaaggaatttgtggttagcgtactataatatattcttacatcgacagcgctgaaagccataagctgacttgttccatcgacagcgctggcaatgtaaaatccttgcgccttcccgaccaaacccgaacccaactcgtgcccttcagtgagctcatcgtcgaagacagtcattgtcccaaacatgaccttctgcagtgtcagtgaccgggaaaccggtcccgccgttgagcaagttgttgttgttattgttgttgttgaagacgttggccgtggtaccgcccagtccggtgaggaaaggaaggttgttgttgttctgtggaacgccgttgttcagaggaaggtttgctccgttgggtttcgcgaacgcccagaatgtcgtgcatgaaaagtgagagcgtgtgatgttgttggtcaacgccgttgacttccgctagtggggatgctgcaacaagtggaagtggagagacaacaggggattcggcagcagtgttgggttcttctggtgtttcgatttcatcaaggattcgagttgaagtggtagccgtgattgcaaatgcaaggaatataagtgctattaatatatttgcattcaggggcatggtcgtggaaagagattcacaccgcgccatagagtgttttgctatatagttggatggaagatgtatgtgttgagatgataatgaaagagttatgaggccggagtggtataaatacccaattaatagaagcaagttcaaacaccataattatattatgatggagttgatgtgtgtgagcggagtagttgatcagagtagctagctgatctcattcaaaactccccaatttctcgatgtagtagtttacactaaatcatatgcttacccataattaaaggaatgactggaagctccagagtcttctctggcaccaaccattacaagctttccatgagaggtaagagtggatgaacagcagaaactgtgtcaataataccatccaaagtccccattgcaccccacaaaattatcaacattagttaattgagataaatgtgtgtattttgattactacggatcttttaccaacactttttttttaatatttaataaaaatgtgattaaattttttttgacaatatttaaaaaatatcgttaaatataaataaatattactaatatgttttgtaatattttttaaacattattaaaaaatttaacaacgttttttattaggtgttaggtcaaaatatatatatcgctgaagatcacgagtgatagtagatattttcacaatattccaaatgtatggcattggcatatatatatatatatatatatatatatatatatatcttggtcatggcttattagaaaagagtgagctccaagatgttgtgttgcttcatcccttttgctgggtgaagtacttattactgtgaccttagcaccaaaagctttggtaaactcgacaaccgtgtggcctagtccagcaagaccaaccacacccgcatgtaaaccaggcttgtctagtgcaatatctgagagggctatacacagtgatgccagcacaaagaagagttgcagcagcatcaagtggtaagctatcaggaatgcgaatcacaaaatgctcatcagcaaccattgagtcagagtagcctccatatgtgatggtgtcatctttatgctttgcaccatatgtgagcgtaaattgtggacaataatcctcaagaatgtcacaacagttctggcaggtgcggcaggaatcaaccaagcatcctacaccaaccttgtccccaactttgaagttttctaccttgcttccaacctctttcactacaccaactacctcatgcctgcaccattatttcttacgttattaaaatcaaactgaatttgtttcttgatattacagttcaatatatgtttgatagacaatagtatagccttgtgaactatctctatgactgaaatcgagagtgtcattgtaggcatattggtataaaagtataattaatgtatatatacccggggactagtggatagttggaaaagccccattcgttcttcaccatgtggaggtcaaagtgacacaccccacaatacaacactttgaatgccacatcttttccaccagtttccctgaaaaaaattatgaaccagtttcagtgttgtataagtagcaaggaacgttgttattaacattttttttgtaatcatcattaacgtgctatttcaagtatattgttctaggttctaaagcattgaaggtatggatcttttgttaaaataaaacgcaaaatttgaaagattagacaagtcgttttatcacgtataatgttgttcgtattttcacagtggaacttagaacatattttgtgtgcaaaatgaaaatacgattccattttaaattttgtacctgaaaacaagttttcattaaataattattttcgcttaaaaaatataataaaatcacaattttgttatgaatttacttttagttaaaaaaatttagaattgtgattcggttgtgataatatccataatgaaaataccattccattgaacttgaaatacatgagagtggtgccaattatgagagaaaagaaaaaaggaaggatattttagtattttcgggcatatagtaggggggccaataacaataaggctgatacaaatatcaattccctttaaagtctaatttcaaaggtgccattagcccacatcacattaaatcaattttcggaaaaggtgagagagtccattcattgctcaacagcatgggtcagtgcaccccacaccgaatctgttgctaactttcaatcctgattcttgcgaatgattggtgccaaaatggatgatgtgggtggatcatcaaacgatgagtataggatgaacagatttaatttatttttaacttcaatttttattattataataccatacatttaaactttttttaaaaatggctaaagtatatgtttaaaaaaagttaatttatttattgtgtatatatgtaatttaaaccttacataacttattaatgatatataataatgtagtatttttttttttttacaaaaacacagtatgtttattacatttaaaatataataatttcattgcaagtcataactattttaacatgaaaaaaatatattttttcttgatttattttatgactttgtgtaatataggttttaaagttacattaaaattttatgttttcataaaaagactaaggtaaacatagaaagacggcttatatatgatagtaataggctcaatgctcgtatgcagacacggatctaaaagtatattaaaaagagagttcaaaaaataattacacaattattaaatatctatcttttaataaataataagtttaacaaaaatatttattattaatttttttatataaaattagagaaatggtccactattaaaaaaattaaataaatatcagctcaaaaatacatttttttattaatattttttaattttattttttcttataaatatatatatacacgtaaagggtcactaaggtccctgcctcttattggattgtttaaagttttgttgaattgatttttataaaattaatattaaattgtttaaatggagatgtctgctttaatctaaataatatatttacatggaatgtgtctttttatttaaaaatataaaaatgaactactactattattattattattattattattattattattattattatgaaacaaatagcgacgtattacgtattctatagactatgctgacatcttgcaaaatgcaaaacatatttagacttacacggtcgaaatccaacttaaactttgcacaacacaatcctatgacagtttaagacaaaaaaaattaattgcagtataaggctagctgtgcctaaaatatggaattcgggctcagaaagctatcataggcaatggttgccctgttgggaggttataagaagggcattcattgcatggctttcatttagtttgattatttatttttggaatgcaaatcataatatataatagctggtattgtttagtttgctttttactcgagcagaaaccttttatatagtaattgttttgaacttgaatatattaatggtctaaaacttctttgttgttactgattattaagccatcgatcagtaagtaaaagcttttacgaatttctatgtttttacttattatctaactattgatatataattactgacagttttactttgttagtaaataccgacagttcatctggctataaatgtcatattttggtcgtttggtgagaaccaatttattgactgccttttcttctttgttaccgaattcttttatggatacattatttgactagattttgcattagagtgttatggccattatcaacgacttttgatcattaataatgacggaagtttttttttgaagtgatacctctattgggagaaatctcttttactactaaaattaaacaaaagaaacatggaaaccaaacttacacaaatctgaaagtaaaggaactaaaattgcatttaaatttttttaccactaatattactattaatttatgttttaaatataactatattactataaaaacataagaaacaaaaaataaacgtgtgtccaaataaacctactatgggtaagtgtactttaatcgtcaaaacccccaaataaaccttaaacattcaacaataaattattagagaaaaatcaaggctaggtaatatataagctagagtatacttttttttacaatatttaattatgtatagagaagaatgaggcatgagatgaagtacacgactccaaatgtatctaatagcaagtactcgtgtgtgtccaaaacagtatcaatgtatcataaataatgaagatagtgatcgacaatgtgagcagggtagggtagaatggtggcatgcatgaacatatgaaagggggttattaagcagcagcagcaagcatgaagagagtttggatatgggagaaactattcagtaataggggacatagtagcactgaagctagcacgctcattcatcggttttcacattattttcatttattaagatatgatataatataagaatcaaagacggcttcgtattcaggcagcaccagtatctatcgtcagttgacagtgaagcttgctgcagtgcatgcagatgataatattgctgctggtgctgttgtatacgtagctgtctacaataacaataaccatacattacatcaaagagaagaaaaaggacacaacttaggtattttaccctttttcttatattatatactggtaatattttcttttatgacattcagattcagtcaaccccttgtttcatatcagaagtgatagcgattgttcatttgacgaaccttaatatttggggtaaggaaaagtatgcttctggattttgtcgttaacattaatttccatcgatataataaatgaaggtacgaatcaatggtatcgtattgctagtacgagtaccctttattatatttactactcctacttctctttttcctttctgcatttattcatattgtatgttaaaaagaaattaacatgaagtccaagagaaaaaagttaatacagattccacagtcataaataaatagtagagaattttccttgtttatataaaacattattgattgaaattatattttatgaaatgctttttttaacctatagtttaattctccttaattaaagtttttaaatttaaattttgtgcatacaaaaatacttcagtaaatataaaaaggttttgtctcttaagtaaattcacgaatcacatgcccagagccttttccaatgtcgcatagtgatgcacggtgtaaaaaattgtttcccgtgaacttgaaaaaaaaattgtattaagttttttttactgattaaactatggtaattaatttttaagaaaacatatataaaacaaaaaagtattaacaatttattttgaattagtgaaagcctggtgatgtctaattcttgagtcccaaaagaaaaattaaccatttattccaatagttgtgtaacatagtattgtgcaacttagttgtatatatatagcacaaattcttcctatcttatccaagtctagctccaattatccatctagtgttttaaaactaacattgacttttataaatgaatcataactctgactaaatttgagagaaaagactaaaccacttaaaatttcgttttgggcctaataaagtcaaaatacatgagtctcacgttaagtactcaagtctcacaagctagacttgagtctaattgagatgtgaggtaggcgttaaaagtttgcaaatactcgtatttggattgaaaatagatggttttttgtacacttaaatagaaaacgttgatcactataaaaattcttgttattacggtgattttttagacaatcggtaatataatgggtgtaacgccgttgagatttgagaaccgacgtgttaggaaattttatttgattttattgttggttagaatctttcattggctagaactgtctccaagtagtaatttttttttcaagatatcaataatcaactctaatactacttgtaatacctaattgcttttaagattaattattgttcatacaaataaatataagattttttttagcatgttttaacctcatttgtaacactttctaataaaacttcaattttgaggaggtcatattcatctcaaaattgtttcatgtcaaacatacttaattatgaagtttttaagtgataaattatcaaaaaataaatacatcttattagtataattaatactaattaattccttttaagtaatgacaactttattagggttaggactttcataaaattgcaatggatttaatcatcaatgaatattaattatgaaattttaattatttttttaaagtttaaaaacattccaaaggaataaggtgtcaaagtgagtccaatcagttcacctaaaaaatcagtcttttgtcttgctatgttcacattgacaattctttacagacgaagaaatgttaaaaaaaatttcttactttccaaataaatcttcttacatctatatataaacattgatttacatacaaataggatttaattttttttcaaaattaaaatttttgttactttttatggttgaataagttgaaattttaggaatttaaagaattttgaaaaagagttactaataagaaaattgaaaaaaaaatctcacattaaagttttttattcttttttgggccatgttgcaatcacgggccttgtacatgcagtctcacccaaaaagacgccagggcatcttgcaatcataacaacaattatttaatattgaatgatatatattataaattttttaggtgcatgattactaaactatattctaaacctcacttacatataatatcacataataattttaaaatattgaggtttctgtaagtataaactaatatactataataattaaggttatagttgagaataccaactaaaaagctaataaaaagtgaaaaaattagctgataactaaaaactaaaatttggtagctaaaatctattaaattagtttaattattaaatgataattagtatccaataaaattacttattggaataactggaaatataaaatgataaaaatagacatatttatatgatatttttatataaatttaaactttattttatgaacaaaaatttactttgaggtgttataattttatctttttatttaatttttaactcttgtagtttctatttatagataaattatttttgttacatttttcacttattacatttgtttcataatgagtattctattattaattttctactatatctccatttttaataaagtttaaaattaataaataaaaaacatatagttaagtagacattatatttttgtcatgatgatcaacgtaaaaattaaaataaataatctaacatgaaaatatttttaaaaaataaaaaaatcaaataaatctagcattttatcattagtgaaatataatattttaatgataaattaaatattatagtagtagaatggttaaaataaaccgtgtaatatatatatatatatatatatatgaaaactaacagtacaatgcttaaaataataaagtcttgtttaatttaaagataccaagaaaattaaataagtattttaagaataaaaattgaatataatataaaaaagttataagataaaaccttaattcaactaatatttaaaaaatgttactatttattattttttactaaataattaaataaattttttcattagtaaaaaacaaagtgaaatgacttgatcgaaattagcctaagtatcatgttgcctaaaaaccccctaggtatatggttaataatccgctataaattggaactgaatactctaaatctctaatgtaactcttctctatcctttcgtggacttatttcttctctccttagctttccagctttaaccgcacatttctctctttaattatttttgtaataaattgtttctcctctcttttaattttcgtctacaacataagaaggaactgaagaagataatcttattattgtgaattagcgggctctctatataaatcccataaaaaaaaaaatcaaatttcattccttcttacgccacatacatattacctatatagggttcaatcatcaaattacctacgaccattcaaattgcattataaatcacactaaaaaacatctaatattccacttcattcccccaagaaattacagtgaacttagccttcagtattacccaattttttaaaaatcattgataatattcaccgacgatggaattattcacggatttaagaccggcagtgacagctaatacggagtttttttttcccattcggaatggcttttggcccacttacgtcactaaacatgcatgccattccaaaaaacaaaatttctctcatattctgctcaaagtcttttactctttacagtaccaatgtgtcccccattaggtgtcttgtgaaattcctccaacaagagaggaatcatggagttgtcctttgttcagtgttcacccaatctaaacttgttcacatattgcatatagatagctgattagtactcctcttctccaatcaaatcacgtgaagattcatcatgccattatctaatctaaaaatactgatatataatatataaaattaatttggtcaaatctaagaagagatcgatcatgttttcaatgcataaatgcctaccattaaagtcttgctaaatttttatccacttataattgtttctacattaattgtgtctggtttgttcagtatcccgtgtttaaaatactggtcgaaattcaacacagcatcgggttaaatatttatggagaaagtttttcttttcttttctttttttttacagagagaaatcttttcttttatgcactattgatgttgttgttttctgattaaaatggaagttttatcttgctaattatcataacaaatatttgcattaaaagtattctaagataaaattctaattaattctgattaaaaataatattaaaaacacaaatgtatctaaattttatccaatatttgttgttctcgtaaagataccgtttttcacttttaattattgtaatttttttatgattcttgttataattaaaactttgattttttttatcattatattaaaaaatacttcataactttcttaagtgttaccatgtggaaccactgtgttacaaaaatgcttatatgacagcgtcaaattagtcctctttctaaaacaaaaatgtttttatcagttacccttatcctcgttaggtcacaatatacttttactacaattaaattttgtatactattttttatttcttttaatagaatactatttcttaatttgaattaaatttaatttaaattttaaattttaaattttcatatacggcagtaaattaaaaacatctttctttcctagataaacggagttttaaatatatttgtaatcataattaattataattagcaaatcaataactaaaaatatctgataaaattaaatatatttaataaaatttaaatttaactataatttcatgtgttagttcttaattattaatcattatattgtaccttgctttttaaagtgccctctcaataatttagtggagcccaaatcccacttgaatagaaaagaaaaacctttgaaacaagagaatgcaatatatagttgtactttagtcttccctgctttatgctctacctatgaagttacctgatccaatcaaacttattatttaatttgtattttgtttattcgcagcatattcaaataattgaaaattaatcaacaataattaacataagtgataatgatttattctttaattaagatgtctaaggttgtaatcttaattttaaatataaaataaattatgttaagagaagaatgatttattttatatatagtcactttttttttaataaagtttagttatcgcttttgaaagaaattattttatatcaatattagattaaaacaaataactaaaattatctgctaaaaaaactgaaaattatgaattaatgttgaaggagtaggaagtagttattaggtagaatatccgagaagatatagctcgtgagacgtaacgttttggaggaaaccttgttcctagtcctatgtacgtaataatgtatgtatgggttatggtttttggtttggtggtctcacgggaatccagccacctctctcacgtgttcctctctctctctctctttctctgtttttcagcgtgcgtagagctagtaatcctacggcgtgcacgtttcttcacaaccatacaatacaagaattggtcggtggtttggttccatctctaacttgctgctacctacgtagctgtgtgatcaatcacacttgttgtttcaagtgattatcgtttctatatttaccatctttaatgccaaaactcaaaactatgcattctattattagaaatgagcctcagaaagtgttaataaatatatgtacacatgcatttcaaagttattatagtattaatttttactttataaatgatccattattaataataatttgcaaaagggtatttgattggcttctgggaatagccggcaatcagagacctgtgtcctcctggcttgtgctgcatgctgcatagtaatctcaaagtaaatcttcttttttttttttttttttttctattgcacgttatgctttagatatctcctggttcccagaaaggtattccattctatcaactaatctacaacaagacaagcagggtaaatggttgatcacgaccgttaaagtcctgttattgattggtatctttgcagttatgagggttttcacaatcgtacttccttccatatgtcagactcaaatatagaaacagacgtcaagcagactggattgaattgaattgaaatcagttcctcctccatctctctctctctctctctctctctctctctctctctctctctctctctctctctctctctctctctctctcttcttcttcttctttttcctcctttcttttcttttttaatggttgtggagcaaaacaaactaattagtgtttgtgtctagtctattctattggtgcttatcattctatgattttttttttgtttttgaccataagaatactctttttcctcaaaatatttaaattcaaaatcttataccaattgattccctgtgcttgataatatcattctatgattttcattttctactttaaaagttttaaaaataaaataacatgatctatgagttcaatgaattaatcacctttccacttgtaactgaacaagacttttcaaggggatgtactacttttactcaatctgctgttcaattaagtggcataaaagggttgtggtaaggcgggccagatgcacacatatcattgataatggagcagtgctatatgctgctggccaaaatagaccacaagttcactgcaattaactaaaagctaatgatgttaatctaattagataagctagattagagggatagctaggggaaaatatgtgtgtatctatatacacatatatatatatatatatatatatattacacgtgtgaacttttattggggattcttcatgaaaaagtaagagaggtgcagttaatctttggttcaaaagggacgtttcaaagaaagaaatagacaagctgttggcagtgttcagagagcatccagtgctgttgctatgtttccctttactgactcagctctctcttccccatcctacgttccatcctctctactcctactgcccctatcatttgtttattctagctggttccaattgtagcttatacatattctattcttatatattactactctgtaggtcacgtaccatcttaattattaaatcccttacttttcatattcttcatttatgctatagcctcatttttatgtgttgcttgcctagcctccattatttttatcacttaactgctctgatgaaagaaacaagtaacactggattgccggctctacgggtggttaatgctatgttcaaagacaataaccggagggtttaattaattacttgagaaatattggttacttacacttaattgttaagagattgaaatatatgcctttaacttattaattcctatagaaatgtttattgatgcacctgtttttttggtacatttatacgtgttggttacgaaatcagttgcaagagcatttaattttggaagagtaaagtcaaaataattttggtcctcttaaaatgttttgtggctagaaattttacaatagtagacaaaaacacaagtgtcaaaatccacgtatatataacttaaaaagagaaaaagaaagacctgcatgtatgacgaaaaagtttgttaaacatgtcccagctgagaagggaaagttacgttttcttactacgcaaacgcaatacaaaagtaattatactggcgctagtatttggataatggattggacattaatttgctgtaaatgtacatgattaaaaacttgattacccatattgtcattcctcaaaccccaatacacgtcttctatcattatttaataaccatattaaaaggacttgttccccctcagctctaatagttttgttctagtatactatagtagtggatcactcatactgacacaactgtttaggatcatctccccccttctccccacccctttctctctctctctctagtatatatatcttacactaccaactttctagtgacatctgtgcccttttctctctctctacaccatacaattatgtgtatagagacacatctttctttattccattggatctgaaaaagaccagttacccaacctcatacatcattttattagttcccaatcaccctctttgatgaggatcacaggtgcccatcaaagacacacaagaccctcccttcctttccttccttctatttcttttcctcatgcatgaaatcattcaattggtgagtatctttgcctctgcaaaaggaaactggaaactgaagaaactagctaactttcccaccccacaaggccaaaaaacttaactttctttcacctctctcaccactttttcctctctcaaaagatgtcacccgatgacacaccacctccaaagcctgccacagcaaaagaccaagagactcaaagttccggtggtggcagaaaaagctcctccacaaggccccaagagcaaggtctcaagtgtccacgatgtgactcacctaacaccaaattctgctactacaacaactacagcctcacacagccaaggcatttctgcaagacatgtagaagatactggacaaaaggtggggctttgcgcaacgtccctattggcggtggttgtagaaagaacaagaaggtgaagtcatcaaggctctcatgtgactccaaagactctggttcctcctcttcagaacttggtggcctcaaattccttcattctctttctccttccatggactttcaccttggagggttacccttccctaggcttcaccatcatcaccctccaaccccttacaaccacttttcctcttttggagacacttctagtgcttcttcatgtttcaaccttgatccttctcctggcaccaccccatcaagttcttttgctgctctcaataattaccctttttcttacaatggtgcaatccaaggtatgagctctttgaatgttcatagtggccttgcctcttccattgagtctttgagttctataaaccaggacttgcactggaagctgcagcagcagcgattggcaatgctctttggtggagacaacaacaaccagaaagatcatagtggtgttaaccagattgagaacctggcacagaaaccacaacccattatgtttcagaaccttgagatttcaaagccagggactttcccagttgggaactccagaaaagaacaaggttcaagtggggacacacacacgccttcaaccgagtggttctttgggaattcttatgcctcagtgactcctacacctacaactagtagtggtggcccagggaatgataatgcgagcaattggagtagcggtggtgtccatgcttggggtgatgtgccgcagcaatatagtgctttgccctagcttactagaagatgtgaaagcacgagggaggaggataaagaggactgagaaagaggtagagtggtataagctagatcttttgtttattaacttttggaagaaattaatattaggccaactctctgataattaattgtcttaaactcctttaggtatatggtagttatgtcagtcctcactcttgttctttacgttggcttcaaaggaacataaatgtaacagatgggaaagttaagaccataatgtgttcatatactcttcaatttcagctagatatgttcatgatcaattgtccaaattcttactttcttaattaatattggatgctgccttgtgcccttcaatactttagtccattattgtagattggatcgatataactgtttccttctcctgtttcctctcttttcagtttaattcaaaattaattaataacgggtcatacaattattttttcctattctttcaaatatctacattcccttttagtagttgttttttagatgtgctaattttgaatggaaagcacaagaaatgagacattgagacgactaaaaggaaatggtgatttaatttcaaaaccaatggtttgatacttccttttttttttgcaatcggattctgttagtattactaagagaaaaaataaaattttgttaaaattagcttatgattaaattaattttttaagaggttcttttattttaacttgttcaaaaactaattttagtttatagaaaaatctttattcaatccaccttttctatttataaatattgattaattgaaaattttatccgcacctctctattattcataattgttttaaactaagtcggattctaactatttttttatgaattggagagttacctctattctattgtttcctctctaaatatggcgtacgttcacatgaataattaagcttggctaattgaaaagcgtataatgttaccgtttacctcaatactgtgtcattgggatctgtgatggaatttttttggcctgttgtgtgatttgaaaatgggggagaatttaatgtgatatctttgatttgttttatgttcagttgatatatccaaaacttacacaacaaacatcactactcactagctactgcctcagcgtgttcctctgatctttgtttatcagagagagagagagagagaactgagactcaggctcttcagtttctgatcaacgctacacaaaacacgcagtggctggccgtagctttagctgctcttggccacttgttagccctgcagtatcaaaccctatagccctgttcactatccctctctctctctctcttaatttctttctcatacatgttgctaagactattcgtaattattgtggcagtgtggtgtgatttggtggtgtctgaaaaagtggtggtttgaaagtgaattgaatgaaacactgtcaacgtttgaataataagagactaaaaatatggtatctaaagcttagggttcgatttttttttgtgcataaaaataaataaaagttgtgtttagctttttagagtgttggagagtgagccctttcaatccgtgctatttgccactgagcatcaactctcattgctctactgtgccatgtacacagagagagagagagaaagcaaagcaggaagcattgctttttcttgcttgtttgtcatctttattcctccctttcactgtttgcgcgaaaaaacgcagaccccacaattgcagaaaagcttagcattatatgctcttcctcacctttatcccactcatcatgactaaagaaatatcaaatatgtatgcatgcaaactgcactatcttccccgcttgtgtaaaacttatttagtgaaatgtacaatatgtgtctcatatatttacagaaataaatataagccttcttcagttcatacaacaagtattcgtgttaatagcaacaatattcctttggcttttaataaaatcagaaaacgccacttttgttgcaaaccctttgcccaacaaaactatatgcgcttttaggcaaatttctattcttagaaagatgttatgttataagcctgaagtgtccattgatgttgttaataattaatttttattaaagaatataaaaaatattcatattagtatttgatttgatttttaaagaaaaaatcatccaaaacaaacataaaatactaatgagattcggtttgattcaatttacctattatatcaaaatataaattaaatcaaatcaattttttatcatatattttaattcaatttgatagttttttttaatttattatcttaatgtaaaatctcactaaacatacataattattattattatgttatattattttaaaataattttttaattaaattttatttgacatattttagttgaaaataatttttttttacttttatttaacattattataaaataatattatatctttttgtaagataatactaataataaattattcaccatttgatatttaacattatttttaaaaatattgatacatctttttttaacacgtaaagtttaatacttattattaattgccgcaaaatattctctattaattagtgttttaggtactcctggaatcaattttaacctccaaaattataataaaaaaattcaaaataattatttaatgctttgacctctaatttgattataaaattgactttgatcaaaatgaaaactaattcaaatacacattattttactatgattttgggactcagaattgattttaggattttatatatatatatatatatatatatatatatatatatatatatatataattgggctacttttcctacttttttcttctgttttacaaataagtcgcacattttctcattttttgatacattctctagcttcaaataaagcattatatatgtacatgaaccaaagaagtatcaatcattgatttttgtccaagtaaattgtaaactcttatcgtaaatatgatgattttctatgtgagttctgtagctcacgagtcactacggcaaggagagaatcggaagaggagctagggatgacttgggaaatgaagaaaatgaaactgcgtgattaacgtgataaagtcggagagagacactttttcaaaacttctgtgtgtggcaaactgtcattttacaacatacaagtgcaatgcaagaagctcatgacatatatatgagaagaaaaaaaaaaactagctattaattctctgcttctcatcattatcttccttatcctacaccgaagagtttggccccaccctcattttaactatcacaaagtattctcatctgcatatcctttaaataatgttaatatcaatagatcacttgtttataaaaaaatctttatatttttttacaataattttttatttgtcttcatcacatcaattatatatatatatatatatatatatatatttgttgttgtgttgcgaagagtgttgtgtatcaattatatatcttatcccatctctttctatctttctttattgtataacgttttgtatgtaaaaaaaaaaaaagttgtaccaattaatgtacaatttgtataatatgaatggttttcattagcatcatgtacatacaaggttgtgggatgtcttgtgactcaagttaaatagttggtctctactagctaatttgtaggctttattcttaattcttttatagcaatctctagctatagtttcaagcttttgtgtttgtttttgtttgaaacttttgatatttaagagctactttgaattgcatcaacggagttaatcaatcaagtagattgagtggatctactcaataaaaagacaaagttctattaatatatattctccattaatacttattatttatttttcactcttttctttttacattgtattatctattatacgtatattttcctttttaaatcttgaataatccggtacctaccaaacttttctctaatatttatatccatatatatgatgtctacaattatatattattataaatatctattattttagaattcatgtcaatataaaaaaattatattatcaattaataaaatcatgggtataatttttaaaataattattataaagttcagtaaatttatctaagaattgtaattagattacttttagtattttttttttcttaaaatattattttagcttagataatagtagtatgtccaaatttatcccctttgtaaaagaatcaagtcaatccattctacctacccactcatcgatcaacacattaattatgggtcaagtccaaatcacataaaatttaaatcaacactcaaaatatcaatagagtttgggttggattaatacgttctagcctgaaacaattacattagacagaaaatcttgaaagttgaaaggagaataataagaaaaagaaagagaagggaaattgggagaatgaaaagaatcatatgaacaaaaggacaagaagtactgaaatgatgggggtggctggtgaatggtgttgggtttgaatcctctcaattcaaaaccggtggccgaaaagaccagaagaaaacaaaaatggtgacggaaacaaaaacattgttctctaaaatttcctttaatttatactatgaagtgctaattctagtagatacgtaatttttgtccctctcactgttccccatacatccatacaaacaacttatccgagggaaagaagagtgcctcttttaggttgagccatgatgttgaagccatatatatatggcttgtatatgattcacttctaactggcaatgccatgcatatatatatatatatatatatatatatatatatatatgcacacacatagtcacatacgtactgtgatctctattttgtgggatccttgaagtgtcaaggaaaaacaagataggggaactcattcattgcaccgactatttaaatatttataaacatatgtattctatagttatcaaacttagtttggatctgctgatttgactgaagtcagctaaatactttaactaacattagacatgagaataaaaatcaaacttatgcatatccatttaattttatgttgagtttgaccagaaaaatttactttaaccacagatttaagttttcttttacttgagaaagcaggagagggtggagtttggtaggtcactcccacacccatcccgtaagccttatgtatatttttataattataattattaataatgtagttatatatttatatataattttattattatatgtaattgttaattatttaattatttcatattttagtttttataattaataaaaatataaaataattagttaaataaataatattataatgataatattaattttaacaaaattaaaattatgcatttaactaaaaatataatttaattcttaaatatgtttatgttatttattctttgttaaattatatatatatatatatatatatatatatatatatatatatatatatatatatatatatactggattaaaatataattaataactttatttatgatttatttaaagtatttgaataaatattattttttaaatgtaagatgatttttttgttgatttcttcaaacccgataaaatttaattaggatgggttggatttcatattttcatcccaccttttataaatctaaactcatctcgccttatgttgggacagaaatgagaatagacaaacccactccccatccatactattctcatccttaactagcacattagacatgttaatatatattaatttaagaatccatatgacataagttaatgataatttggtaaatatttagctaggacatgtattgggggaggggagagatcataaaaaacttaatcttaaataaacaacataagaagaaagactttaatttttataaattttctgcgtaaaataaattttattatcaactaataaacaattatgatatttgtatatggttttttttatactactcctacatttaccattttctctaagaaaaatgataagcttcacatttatttggcaaagaaagagggtttaaaatttggcataaaagtcttacgaaatttgattccttaagtatagttatatcttctgttataaattagcttcacaatctcttctcttgaaaggtgtttgaatttttttcttattttaatttgtgagtttaatttatttacaccgtcaacttataagaaatcataatagatattctttttaagtagttgtgttaatcctcttcaacataaataaatcttttaataatggtgaacaatatgtcctgaaagtgtctcttaatgatattttatctttctacagcctttagtgtcactaaatttgaattttttttaggcgataaaatgaatcgagtctgaataatctgcttctgcatggtagggttggtagaaacatcatgtttttgtataaaattaaataaattggttttacacgagaaaaaaatattgtttttttggtttaatactttcgtttaacacgttttgcgagaagtaacgtcaataaaaaggtgtgtttctgagaaggaacatcattctaccaatagaaaagcaaacgcactcacatctctaatctgttaccaatgccactcacaaactattggcaacaaccaattcgtaaagaaattccaacattctagtttaaattaattataaaatttattatactaaactccctcagctaacatcaattacactcgtagtctaattgtttagaaaactatacatagtgtataatcagcacataaaagaagacatgtgtgtagttataaaagtaaacgtataagaataagaataaaatataaagtaataaaatttcgtataacttttcaaacaaatattgtaggtgtaaaattaacactaaccttaaaaagagtttaaagagaagtgtgaattatgctaaattatgctgaatagccagtaataaaatccagttaaacaattgatcatcttatatgataaaattatcatgagaaaaattattttggtacaaaataataaatatgataacaatgatttcatatattgcattttctaaacagaaaacttcatttgcaactacacacaagagttggaattctatattataaaaactacacacacaaaaacaatattcaatatgaattgttacaggagcgagcagccccttttttttatgttggatctactatcttgaccaaattttcttcttagtgtccctctctttgattccttgaacctgatctctgcttgtgctacctctcttgtgagacactggggctggattagcagtgactggccttggtgttggcctcacaccccttactatttttggtggatcagatttccttgcgactcttctatcatgtaataatgatgatggcatgacaaagttgttttcatcattgcttcttttgcttcttatcttatgagtggaatcattctctttgaacaaagaaccttggcttatcttatgagtggaatcattccctttgaacaaagaagaaccttgacttatctggcggtttaccgagtctgaacaccttaaaatgccagtctcaatctcacttggacattcttccctcatgcagcttttacatacatctggtgtggctgcttttactgcatccacaaaagaatgagtttgttgccactgttgctctcgctctcggtacctgtcctccagttccttcatctgtcatgacatatattgacacatgagcacgtgcattaatttaaaacaatccacttaaaagaggcaatgaaagccgagtgcgataaatgatgaaaattgaacactgataatggttactgtcagcctgtgaaagagttattaattaggatattactcttaaatgactgtgatcaaatgcacaacagaaacaaattgttaaatttcttatttgagatgtgcaaagtacctgttgacgaagcaaggacattgagctttgttcctgctctttcagttttctctcaagctccttgatctgaagaatatgaagcaatgaacataaaaagaggcgtcattaaatatattccattatcaaaattagcagaatatctaattgtacaaacaactctaattgttgacaaccttatctttcaaaatggcagattcagactcagacccttgcatctgatcttccagttttttctctagatcccaaacctgcttacgaagaagaactgatttattgattgagagaaaaaatggtaaactttttcttcaaggaataattcatcacatgataatgcatgttaattcatcacaaagatgagtggaaggaagcagttttcgcaagtaacagacaaaccttctgttgaaaacttgctgactctgactgcagttgttctttcatctttttctctagctctttcaccttcaatagagacaagtgttttgtcagaaatgaatgtgagtaacagagtaaccaaggatttcattttatttaatgacaaaatcaaacaagcacattgttttttgtggtatgtttatatgtggagttagccaaatggcccatcaatataggcatccccttgtcattactaaaacaatgtgtagatgagcaaaaaagttcaaatggcaatgtcaaaccgaaaccaaccttttgttgaagagtaccgcaggtttcttctttccctctcaatttggcagataattgagagatttttttctctgagtcattttgcatggctcttttcaactcaatctgtccctcaagttcttgaatcttttcttgtagatttttgtaaatttgatccttgcctttggccttactctccaagctttgcaaattttcttcaagttttcgcatagattcatctttaattctgcactcactccgtgctttttcaagctaaagccaaagtgtaaaaggaagaaaacattaacttgtattctagaacatggtgaaatagaaaataatttttaatgtgttcaagtaggatcagcaacctaccattgctttcatcttttgaacttcacttgtatcaatttgcttcttaacaggacctaactcaacacccctcactctagttgcaaaattaagtgagctcagtgtctcacctacgtcctggtctgatggacttatttgtacaaacatcaaagttttggagtcacctcctgcaatgttttacgaaaaataagcaaggaatgttaccaatatattcttgcataatcaggatcttactcctcaaaaacacaaacacacaaaaagctgaagtgactagacatacctagtgagtcttgaagtaaatgtgtcagtttagagttcctgaaaccaccaaaggaaagagcatgaataaaacttatatttagttatttataaattaagatgcggtagaagtaaagaggtgcagatatacctatatggaatgtgactacttttcgctgctaaagcggatattacatctccaagggcagaaagagatcgattgatattttgtgcttccttaagccgttccccttgcacatcagtctttgcaagtctctcactacctgccaaatccacaagccaaagcttgctcttggtagattcgccactcaacaaatttttagcctttactgttacacaaagcaggctgaaacagatataagcaattgttaaaaattgtaggaaaaaaagcatattgatgcagaggttctagacaagaaatcttcttagtatgataaatgaagaaaaaatacaagagcttggtaccagtgagatcgactgctgtgctcattaacgttattacttccaactgctctagcattatttccgacctgcagtacattccacacttcatttatgttatcaatcctggcttctacaacaccaggaacatgatgaaatccttcagaagcttgttttatctccaacctgataatcatttcaagataaatcattctagctacttcagtttcctgctcagactagtgatattgcacattctagcatgcttgaaaccacattactatatcagactatcttacaagtggaagcagtgataaacataacaaattaccgctttgatgtttgtcctgtagccaataagtctctgatttgttcattgtaaacctctatcacactaacagatatgtcatatgaaaatgtttcactcctttccttactaactttaaacaagtgctcaagagtcctgtaatttactcctctattctgctgtgttccttccatggtgaatgtcttccctgttcctgtttgcccataagcaaagatgcaaacattgtagccatccagtacagagattaccattgatgatgcatcagcaaaaacatcaactgttaaaacatagaaaacactgttgtttagaaaagttccaattatgataaataataaaaatcttgtactaaatatataagagcgatgacattcaaggctcaagcaaatagctattgtgttacacttttcagataccttgatcatcttttggtgtataaactctgtcaaatctgaaagattttttggtggagccacttgtcaaaattccaaggcaaccttcctttgctgcatcaaaatccacaactgtattgcttccagctgagatttcagccttattcaatggacgacatcgacagaaaaccctaatgttccctattattcataacagaagtgtcattagtgcctttgacttaaaatagttttctttatatcagaaaaaagtccatatatactatgtagaataagtaaacatgacatgaggaaatacctttagcctcttgaacttcattgaagagtttctttctctttgccatctcttcgctgtacttcactttgagatcttcacactgcttaactgcagaaagaagtttttagtccgataagattatttgtactatttcaaagcaataaattatctgcaaacttacattgacaaaattggaagctaaataatataactaaagcatacccaattcctgaactgcaaaaaccatcttatttaattcggggattgaatcaacacattcatgcgcttcaaaggaaagttttgaataatcactcttcatcaactgcaaaacaaatttagcataaatgtaagttaagttatcctctgagaataaaaaataataataataatattgataataacttcaagtttaactccttcctgaattttcatcaattaccttaattttttcttgtaaactgttaattgcttctgcccatttcttcttatcaagctcatacctattagaaatattcctcaggctttcagcttgtttctctacagtttgatctgccaaggaaattggcaatagaattaggaatcagatataaggtgatgccattgatgcaagtgcatcttactgcattacatttattaagaccataaactatgcatagcaaatagaaaatgaaataatcatcagatctcgaaattactacaaacacatgttaatgaatctcataaacgagttaaaaattaagtatttttaagactctattttccatgctcttgaagggaaccctgcaaaacttaccagttgtgagtaacttaaatgtcactttgtcaagttccatctggactgcctccaattgctcattttttgctgttaatgacatccatgcctcatagcattcttttgccttgagatcgcactgcattgtgagctcttttatcttgctcttgtactttgctgtagactttgcctgcataactttcatctgaaacattccaatgaaaaacagaaaaagcaaaatgttgtgagtcagtgacacttgcacttcaaactgccacttatcaactaggttacacctctaacctgtgatgaaggaatttcaatctgtgcagcacaggagctacatttaatgtaatcacttgtcacttgtggaactgtttgaaaaaaattacaaaaaaagacagcaaattgctgagtaaccatctaggccagtggcaaacaattcaagcacattaaacagaaatacagtacctgacgccttcgttgctcttctaatgcaaatcccactaacaactgggcttccagatatactttcaaatcttatgagaataaccccatcatccttaacagacacccttgaatcaaccatctgtaatggcttattggctccaacaactgcatagatatccaattcagatagaacctgccattttatttcaataaaaaaaaggggttgaagcctttacctgtataaatttttcaaatataaatgcataaaaataaaaatattctagcttgtacagaaaaacatgccttttcatcttggatgtatacattgaacaccctcattccttttggcccatttatgttaatgatctccacaaaatgaagatcaacaacgtagtctccaggaggaagattagcaaacctataacaaaagcttcccaaccgagctgattggtagataaatgggtagtctccaccctccactatttgctcattggtacgcataacgttgccaccatcaaaataggtgtcacccaggaacgttattccaccagctgcttcactaaaagcatcccctcccgcatttacaaacatgaaacactcctcttctgcttcaaaacgacataatattaaaattaaacattcgatctacataagcataaacacctcaagtcctgtctcaatacttagaacgcagcgttttgcatttttctgtaaacttcactgaaaattcaaaagtttgatctaaattacccgtgtaatcagattagcactacacttctaaactaatcccaactacaatttacttaaccctaatccaaaattctaaatccccaaaattaatacttcactacacaattgccagcaactgttatgtaactagagaaaataaacagaacgagtttgaaatccggttgaaaggggtgattcaagggtaattgggaaaagggtaaaggtagcagcactaaatttcaacttagaaagaggaaaaatggaaccttttctaatctatttttcatttctagtcacagtcctaaccataaagcccattttatgaatttgtgatattctaacctgcgttgccagatctcgtaagcccagttgggaccagtcttgaactggagtcgcaaaccatcgaatcgaacaaggactcgttggcgtcgtgcattgaagaatctttaggctctgagattagggtttgtgggtattgctgaacgtcgttcgattgagtcggatccatgtgaaagatggaggcttggcaatcaagaaggaatttctagagagagagagagagggggggctggttccgtggcaaagagaaaatttcagagtgcttcgaaccgtggcgagggatgggaatgggatccttcaaatttgaatttggtgaccgttgataagttttgaattaaccgaccgttgaagttgaagtatagtcctttcttctttcctttttacctttcagcttgaagagaaattcgaacagaacctaccaatttatcgggtaaactagaagaatacgaaaattatttatggtaaagtctttttttttttcctagtagaaaagtaattagagcccatgtattaaatttgaaaaataatatatttgataacgtttaaacaaattttttttagagtaaatcatcatttttgccttaaattattaccatttttcttaaattgtctctaaaataatttaaataatttttaaaaatattgaatatttatccctttaatttccaacttgatatagagtaaagtttaggaacaaatttaaaatatttgagcaactgcttaacatgatttttaatatcctaaagactatttaagtacttttttgttttaaaaactaattaagaacgaaaataatactttaaagatgaatttaacagtctagttttgtttttttatcaatccatcttataaataatgttatagttgtgtataacaaattagaaatttttaaaaatttgaatatgtatttcaataataaaaaattacttatgttttttaaggcaaaaattacttatgttttaaataacacatttacattaaaataaacgctaagataagctgttaatttgttttaaattatataaaaatatgtacatttggtctatttaaatgggtcaaaatttaaatttggtttaaacaaaagaaaaatcaataaatgtgttattttaacatatttgacactagcatgtgtttgaattgaattattttgaaaaattatttcacaatcaattagatatattgttataatctataatggataagaagttttatgtttgaatatgttaggtgaaaagtagttttaagattttatttatttgagtattctaaatattcaatttctatcgtataattacaaaaacaaatgtttgcaatagttaatttgtataagaaatttaatgttttgaatatgttaggtgaaaaccggttttaggatcatttatttatttggattttctaaaattatcaaattatataatattttttaaggaatttttttaatagttattttgtattaaaattaataaattagttaatatgggataaaaatagaaaaaaaaaattaactaggaaataatattttagcatttaatatattataataaaaaacaattttcttttgtaatatattataatcttcttttttttgtcaacattaccaaataatagaaaacaaaactttaaacagattataatataaaattaattcaatctatattctaaacacacacttttgatgtttttggattaaaaaagaaaattaaagaagaaagaaataataagtatgaaaataaaaatcatctctcttgtttttctagtctttatgttattttagtagtttctcttttttcgattattactttttgtatctacactgttataattctagacttcatttaagagatttgagatcaattttaattttttaatataaaaaatatatatttattgatacccaataacaagaaatccatcttataactctaagaaattagttgagtgaaataaaatatgattttgcatataatatataagtttaaatattttttcagttaatttaaaatttttatgttttttcttgtaaaattatttttttagtaattacaaattatgtttgtttttcatccttaaaatattttaaacagtactttgaagagtaaaaaaatattatctaaaatattataagaataaaaaacaaaatacataatttacaatgactaaagacaaaaaaataattttacaaaaataaaaaaatactaaattataaggagtaaaaaagtatttaaacttaatatataataagttttcactcatcttagtataagataaatataaatatatatagttttttatttttatacttttgtcagtactttttgagtccgaagatttttgttgccatgaattaagacgtcatctcttccctaaattttaataaaatgatttaaaatattaaacccaccttatatgactcctcgttataattatgaggttcaaaaaagtgttaaatacgcgattattcatggatgcttgcttggactgggtcatgtattttctttaacgatgccgtcaacatctactatggaatacagtacttgtttgggttggatcttgttctttttgggcctcacgtcatatacccaaatttctatagaccattagaccactgttaaaaaacacactcaaaataggattttaacactctactctagatgctagagagttgagggtgaataaagaattttattatgcaatataatgctttttttgaagtaatattttattatgcaataaaatatagttagcgggttctacaactatcattataagttcttatatttgataaacgatatgtttttttcttcaacgtatctatattatgttactctataatatgagaggatctaaatctataaaattaaataaaaaattgctagacaactgccattggggaatgctcatttgcttctaataatcagaagacacttcaagtatcaacacattcatcagtttagcataaaaaggtagcttaattatagcccaaaagctcattttgtttcaggcatcttttcgttattgctactttgcattgatgttattttgaaactttgataaaattatatatgattaatatgaattttagttaaaccaatttagttagtatttagtgattggtggttgggaagggggttgaaagggggaggagggaagaatatagattcgaatctctattaatattttaacaaaaattaataactaaaattaatcaataaaaagataatatctagtgatcggctctcccaaaacattttactgatgatctgccactaatcccaagttcactttgtgctagttaaggaatcatacttctattttacaattatgaaaatggactttgaatattctccactaatcccaagttcactttgtgttagttttggaatcatatttctattttataattatgaaaatggacgaccttcaatattctccacccatgttgttcacttcttttccccgtccgtagaggttaaagagaatgatcacgtagtactgaattgctaattgtacccagttagtgcttcaaagagtaatttataccagattctttggttgaaacattatgatgcagatttgctaggatcaatgtgcttattccttttcccttgccattttacaccaatgggtgaaagacatcatccactgatgatttcaatttttatgtatagcttggatcctttttacactccttggtggaagctatttgaaacaaatttgagcactatctaactagtaacattaaaggctaggggtcgcttctaacatgtactagttatttttaattttcctttttcaccttctattattgggttaatgacttaatggatttctcctaaaaaaaattactaaatgcatgcaactcaactcttcctttttgttttaaacttcttttttttataaacaatacgtatcttctattaaaaaaaaattgttttgagtaaaaaaaaaattatgaaggataaaattttctttatagatatttaacataattatatacttaatttcttttattggatatacttaaacttaataatactcgtgtactaattaattcaggtactcgttagtattttaacctgaattatagtcacttgaaatttcatatacttatttattcaaatgagaatacacacctttctctacctatccgcccgagaggagagggaaaaaacaaaaatcaacaccaagactggtatatatgtttttttaaggcaaaaaaaaaaatgtcaacaggcaaatctagaagcagagaatatcattcgttggaattaaataaaatttgatacatattacttgtatcttctaattaagttatccgcatcttaaagacttaaattcaaaataattagtataattaaataggactactttatcattaagggtttttttttaattgtaaggtctattaattatatatatatatatatatatatatatatatatatatatattgtttgtttgaacacatgctattaaaagcaattttatttcagtcaaataatattattatgagggttaatttttttttcaaatatttaatataaatatatattcaaaaattaaaacctaaaatctttaattaagttacaacaatcctacctgtgttgatgtaaacatttaatagtgaagtgattatcaattaatgatatatatttattttcataaaaatgggatgtattttattaaattatcaataaaataagatatactttgttaaaaataatcttttattaatcatcccttaaattatttaatggnnnnnnnnnnnnnnnnnnnnnnnnnnnnnnnnnnnnnnnnnnnnnnnnnnnnnnnnnnnnnnnnnnnnnnnnnnnnnnnnnnnnnnnnnnnnnnnnnnnnctgcgagtaaggaaggttccaagcctcatatcacagatttccaaggaaacaacgaacccatctcaatctgcttcttccctataatcgaacccttcaaatcgcagatcaaaatcgaagcttattatacagtgatgatgaccgtgaagcaaggtttcttctctctgcgaggctcactcctcttcttcgcaatcctcacccttctctccttcacctacctttctctcaaatactccaccccaacaccccaggtacccctttttctctttttcctccaaccccattttgaaatttctcatttttcaccgttttctcgattacccttttgctctaggttgccaagctctcggtcgagaacctcaacgatgcgccggtaagcgagaaagaagagaaagaagaggttccggacacgtaccactcgccgcgcgtgttcaagctgaactatgaggaaatggagaagaagttcaaggtttatatatacccagatggggatcctaacacgttctaccagacgccgaggaagctcaccggaaagtacgccagcgaaggctatttcttccagaacatcagagagagtcgcttctgcaccgaaaatcccgatgaggcacacctcttcttcattcccatctcgtgtcacaagatgcgtggcaaggtattttttttttcccctttctgcattctctcttgttgagatctggggagaatggtacaatgttagatgcatgcattactagtgagtagtagatgtggaactttagttaaaaaggaaattgctggagatcctacattaattaactagtgatatggtacaatagtgaatataagtgagggtaactctcacttcatgagctagctagcttttgggttgtgttagcatgttaggtccaaacccaaaattttaagatggcatcaaagcttatccaaataatttttcattgggtttattgggtcacctgttagcggaccatctgcaaatgtctagttttgcaaacttacgcacaagatatcacaatcctcagtatgaggggtgtgcgctggaatcccacatttactagtattatggccacaataatgtgtatataactggaggcaacccatatttggggttgagtttggcccaaactcaaaattgtaaaagaaattattaatgaaaatgatagatagacaatctttagcttggattagatggttaagtgattgcttctgggtggaatgtggtctcatgtttgcgtgttatgcagggcacgagttatgagaatatgacgataattgtacaaaactatgtggagagcttgatatccaaatatccttattggaacagaaccttgggtgctgatcacttctttgtcacttgtcatgatgttggcgtgagggcaacagaaggacttgagtttcttgtgaagaattccattcgagctgtgtgctcccccagctatgatgttggattcattccgcataaagatgttgctctccctcaagtgctacagccatttgctcttcctgctggggggaatgatatagaaaacaggtaaagttttttaagacatttgttgctccacttagttagattgtacgaaaaaattggtgcagattaggttttggggattggattttgctcaatgacttatcatcctgcttttgaagtgttaattttttaatggtcccttaatgagagggatggaaattccttgataattctcagaatgtataaatgcctttatcacaaactcactcatgacccacaagtcgtcagtttctataatattctaagttgctcttcaatttctgacttctggtaacctggtttaaaattatctatgctgtggatcttaataactcccatggagtacagaaatgcttttctggttttcaatgttgctatcctatccaagaacctgatttttaatacatattcgtttcatgtaaaatagtatggaaatgtaatatggaatctgtatttcaggcaacagaattagtagggacacttagatgatattatatcataagattaattaatactgataatgatgcaataatatgtagtttgatctgtaagatcaacagacaaggattctacttgcatatttattgattctgaaaatttgataaatttgtgctttgcagaactactcttggattttgggccggtcatcgtaactctaaaatcagagttattcttgcacgtgtgtgggaaaatgacacagaacttgatatttcaaacaatagaattagtagggctactgggcatctagtgtaccagaagagattttacaggagtaagttttgtatatgtcctggtggatcacaggttaatagtgctcggatagcagactctatccattatgggtgtattcctggtaagatcatccgttttaatgatattttccccctttgatttcattgttgcatactaagcctcttaaaactgtatacttatatgacagtgcaagtatatataaactgcatacttattgcctagtgatttttgtcaggttttatggatggtatgaaattggtagatttactttgcatatttcttgtatggcattagttgctcagattcctttgtacttgtgttaaactatgaattaaacagtgtctattaagaaacatttgcaaatcctatccttgtataagccgattaagctttggttggttttatcactcctaagactagaattgcaactttattgtgggatgatgattgagtgtctgaaatatggtggtttaataatcaaataattaataagcttcaactatatatgtatatagttcaatatgaaaaggcagatttgtccattggaatgaataataataagtggaagtttatattgtttgactgttggagggagtggaagctgtattgtggaatacatgagtgcctagggatcaaatttaagactatccacccaatctccacccctccaatcaccatagctaatgttgaaatactttattggatagtgataataaaggtcaaattcagtagaacccatgtgaacagattacacatatacttcatcttggcttgttatgtatactctgggtctcaaaaagtagtacatttatgatattgtgaacgcaatttgaactgtaacttggtttgaatagatgatgctctggcttttggaacaggatgtatgtagacacaaccttgtaactgacctgaagatgttgttttgcagtgatattgtctaattactatgaccttcctttcaatgatattcttgactggaacaaatttgctgttgtactcaaggagagtgatgtataccagcttaaacaaatcctcaaaaatatatcagatgctgagtttgttacccttcataataatttggtaaaggtataaatattctcattactttatatggaatctatatattagtgaaatattttaggtttttgcctttattttgtgtgtggtatgtaaacgtgtgtattgtacccttttgtttatagttcggaaaaaccctttgaatgctacaagtttcattttttttctttttctggaacttcttataattcttattatagttcagaaaaaccctttgtttatgttgtttgaaaagctatcagtatgtaaagttagaagagaaatttagaatgtaaaccaaagtaaagaaagaaagaaattaacagcatgtttggttagaattttttttctgtttttatttcttgattatgttagaaataatgaaaataacattatggggttattgcttgctatacaaatcctcaaaatcaagaaacaaagtaaagactaggaaagatagcatttttttaattattagtaaaatagaaatgttttcataaattaagaaggccctgagaaaatggagcccaaatattttatcaccagtggttgtttggtcggtagaattttcgttgctaattgaattctgttggagcttacataaagttgcttcatgttttatcaggttcagaaacacttccaatggaattcgcccccaatcagatttgatgctttccatttggttatgtatgacctctggttacgccatcacacgatcaaatactgatatttagactcttagagactcttattttgtatacaaatacaattttagcaactgagagagcactgtaaatatagccaattacagctttttatacagcagatgtttttctatattcttgctccctgaacgtttcagttaatttgttatttgtttgtggtaaggttctttgttgggttgaaactactacatggccaagctattgaattaaggcaggtgcaattgttagagtaaatccaaactagaacatgggtaggtatggcttataacaagttaacaactgactcatgatatttaactgagctatgatttgttgaatattttaggaaataaatgagttcatttgttgaaaaattgagcctgactttagcaaatagatataattatattggttaagcagtgtggattatttctatattccttcactatgtctatgattttcatggattaaaaaaaaacttatttttcttttagtttgcaccagtggtaattgtagttaatgatcacagtttatttatctacagcttagtttactccaatccgatggaatccttattagatcaaatcacatttttatttgtaatgattctaaaggcaatcacattaaacctattcaggataaaatttgacagaaggatatattaaaaaatcaagtaaaaattatcacactagaatcgtattttcatatttagttaggcaaatcataatcggtaatatggcaaactaaatattgctcttcaatcacttttatcatgtatctcatgtgcatgcatgagacatatagtttgtttgatgtattaatcatgttgtgattttgtatattttaaacatttttagatgttattcaattgttcatttctattaaataaagaactaacattcaagataaaatttttggcatcagttggatacagaaaataaaattcaaataaaatttgttacactccattatccatgccaatttcacacttgaaaaatcacattgggtgaataacattttatattttaaacatattagtagtaagcattgctctttgtaaaaaaaaaaaagtaagtgttgtttaatacttcattttcattaaataaagactatcagatttaagttagatacaaaaataaaatttaagtaaaatttataacactctttagcaattttaatacttattttcacactttaagtaatcacattaagttaataacacatgttaaaaaatacattttaattttattttgtatgtttatgcacatattagatactacatttaatgtattaatgttgttgtgattttacatattttaaacaaattattagtaaatgttattcaattgtttcattttgtcccattaaataaacgtgcaaatcacgttaaagataaatttgtggcattatatataaaaaaatcaaataaaaaataaaatctaaattaatatactcaaattaataaccatagttggtttctctacaacttagtttacccaacccgatgaaatccttataaaataccattattagttaggaattagatcgaatcacatttaatagtattaagtgcaattgaatgattgaattatacccatgaaatatgttattcctcctgttttatatataagaaatgttagacaaaccattaaaattataaaagtggttaaattagttatttttaattaatatcacaataaatttaaattttattctaaaaatgttattaagtttaaatattgtaagagagatagtcatatttaatgtcaatacttacaatctaataaatgtctaataaataaaattaaaaataaattaaagatataaaataaatttaactcttgataagtttgaaaactagtcattatttcttataattaggattaaaaaaatacaaaaaaaacataatttatttcttatatataggaacacatgtagaattattaagttataaaattaaatttaatgacatcaaatatcattcaaaatcaagaataacaaatcgtaaaaaaaatataaaaaaaaacaaggttggctgtttggaacaattttaagaaatatctccttatttttaagatgattcactttttatttaggagaatattgaattaaattgaaaataattttctcttaattgtaaattttatcactcaatttttattatttcataaatttcaccacctaagttttacctaagttttttttgaattttatcaaccaaattatcttttttactcattttactactaatgacatgtaaaaaaacaaaatgatgtcattttgttatcaatttcttgtgacacaatatcattttgttattaatgtggtgataaaatgcataaaagttgagaactttaatgataaagtttgtaaaactataaaagtttaatactaaaatttaaaataaaaaaattaagtgataaaatttgtgaatcgatgaaaagtaggcagtaaaatttatcattaaacctaaagtctattcaactataaaaaaattattgaagaggacttctagagttagaaatgagaagtcgaaccttaactagaatctaagatgccaaagaatgaatttgtacgttgatatattattatattacatttgttctaagcaggggaagggcctttatggcggaaaaaaaggaatctgacaagacattaggtttgattgagaggagaggagggaggtagtcatttcttgttaaagaaagagattttaaaaaaattgtctttacaattgtcaagtgcaccaaatcgctattaagtagtaaaactcggaagtccgagtatcgtttccgcagggattttattgcactttatcaaatacttctcaatttataagtaagagtgataactgccaaataattgtattttgataatagaaaataaggcaaaattgtctttaaaaataattatttagcagttatttgcgcttaaatattaaagaattgatgttttgttgaattttggctgcagatataaaaactggaggcataacaagcaaaaaggccagaaaaattgaagaaaagaagaaaatctaaagcaggctcagcccaatacgcgcactgagcgcgcgtcacgcgctaagcccatgatccaacaaagcgtgcgctaagcctgcaacacgcgcgctaagcccgcgatctaacagaagtgcgcgctaagcctgcaacacgtgcgctaagcccgcaatctaacagaagcacgcactaagcctgcaacatgagcgctaagcgcgcgatctacacgcgctgagcgagagggtgtcgcgctaagcgcgcctacgaaagcccaaagcccacttcagcagctataaatagagagccaatccaagggacaaaaaagaccacgacagaaccccctctcctaggggtttcatttactccctttctttcaccccttctcattgtaaagccctcaatggccatgagtggctaaacccccttagttagggcctgacaggcctagaagccaatgtgatgtatgatgtactcttcactatttatcaatgcaataccaggtttttctttcctattttcttttctgtttttatcttgcatactcatctttatactctgttaggagttagatgctcgggagagggtaacttctaaataagatttaaagaagatatgcatgcattagttttaggggttagacgctcgggagaggataacttctaatagaacaagaagaaaagatatcataataaaatcattgctaggcatagagtgattgtattatgcccatgcgtcaaagcaaacatctagaagtagaacttcatgcattttatctattgagtctttgcaaaggcatttgggagatagataggtagaataggcttgtcatcgtgaggcatcaggggcaagtaaatgaatagatgtgggtagggtagaatcacttgaattgataaagaaaaaatcataaactcatacatcctaggcagacaaggcaagtcagttcctaatattattttatcgtgaatttatcctttatttaaatcttttatctttcttatctttcatctttttctttatctttaaatatcttatcttttcttttatcttctaattttatctttaaatatcttatcttttctttagcttatcttctatctttctttatcttttattttaaattcttatctcttgcttttaaattgggtttgcattaatctaagtacgaacaaagtccctgtggattcgacactcggacttccgagaactttactgcttgtcacgatttggtgcacttgccaatgagtcaacaagtttttgacaaagagtaaaataaaaaacaggaataaatgcagaaatagggcgattacaaacggggaagacaattaataaagatgtcaagaccggacaaacccaattggcctacgatgcatgtaaagttctatcttaaatccttattaggaaataccttcccccgaacgaataaaacccacaagaaatttaagaaaaaatgcaagataacacgaaaagaattagaacagaaaaacctggaataaattccttttgcattgataattcttgaggcacaccgtacatcgttgactttttaggcctgccaggccctagctaggggattagccactcatggccattgagggtttacaactgggggtgaaagaaagaatagggataaaaacaaagaagatagaggaggaagagagagctcaggcttggagtgctgaaaacagtgctctgaggcgagatgatttgattccctgggattgactctttatttatagttgctgaagtgggctttgggtcttcagagtcacgctcagcgcgacacctcgtgcttagcgagttcggatcgcgcgctcagcgcgccttgccagcttagcctatacttctgttgaatcgcgcgcttagcgcgtagctgggcttagcgcgcgtaacggtttcagcttcttcgagcttaacgccacttagcgcctgccttttttgctcgcttagcgccttacgcgcgcttagcgcaagtgttgggctaagcatgcttcagaactctctctttctcttcatttctgttgccctttttgcttaatgtatcctcatttttcgtatctgcaaccagaaattcaacttaattaatttctcaacttttaattataaataattgctaaataattaattcttggtcaaaatttgactaattaaccactattaatttacaattatttagcagttatcaacaattttaaaatgaaatattttagtaattaaaattgactaaaaattgattgaatagaaacataaataaattttaaaattttaaatccactctccctctccttcaaagcccccaaaattggaggggaaatcgagatggtattttgctctccttcttaaaaattaaatcaaacaatatagtttagaaaataattattctcttttcctttctattcattcatttttattcgatcaagtttgattggatgaaaagaaaataaagaagaaagaaaaattttaatatttgaattggaaagaaaataaaaacagggaaaattttaaatttttgtttctataactaaatagaaggaaatacttagtaagtcatgttttcttccttctttattttctttcttctcattttctcttttatcaaaccgaccatatgttatagcaaatgccaaagagggttctattggaggttttggttcacatttgctaaatatagttggcattctgtatgtacaactgaacatttccgcaacagtcttgaagaacaatgttgaatgtcaaatgagaaaaccattgcttcaactaaaccaacgcatagtcagactcattcttttgctacatcagacattataaagctctttgatcgaactttgaacttttgagacaaaaacatggtgtagttgcttctacccggttaaggaaaaggatagttatctttcagtgtaacaaccaattgttgttacattgtttagatgttgtcaatgagaatccttgtataagtgccaataaagagtgcgtagatgctgtcaagggtggtatacaagttgacaaccgaactacaagttctgataaacatactccagaagcagcagaagacactattggtatacttgctggaaatggtgaaaatgttggtaagtgaattcactttgatcctttatgttatttagtaggttcattttagtccccttttttttaaagactcaaattagttcaacaaaagaaggttcaaaatggtcttttaagtttttacaaatgttcattttagtcccttttttttaagactcaaagcttcacagtgaagaaatctcctctcagtataaaatgtctttctcctaaggaatttcaagcttggagagacaagatgccatgttataattgcgatgagaaatttcatcctcacctcctactataaaatgtctatcttccaaggaattccaagttcggagagacagaagtttatgttataattatgaagagaaatttcatcccaaaagtcattgtagtagcagttacagaaattgaatcacaagacaaactctctgcactgctaattgtagaatcttgaagaggttgtttggttggagaaaagaaaagagaatgaaaaaaaaaatatttgaattaaaggaagagacatataagtgtaagatccacgcaaaaatttgaaaatttcttcttctttccttcctatttgatctcaaccaaaccaaggctaactccacaccaatccatgatggaggagggtcttgaacccattatgtcccggattagtatgcctgctctaggagacaattttatgtattcacataacttagcttaagactttaaataagaaaaataagtttcttgtcacttcaattaatagtgttggcatgttaaaaaaaattcaaaaaatactaaataactttaaaatatctacaattttatgtacttatagaaacttttcatttaactattgcatcaatgaaattaaatgtctataaaaaaaagtaataaatgagataaatttgaacaagctttagagtagataaaattcaatatagtgagagaaaatttaaatgtacaaatagtattacactatcatcatttttaatatatgaatgagcatggtaaatgtgagttatataattatgcataaatgatcaatatttaaattcatatgatcatttaaaagagtcaaataactttttttttaaaattacataacttgtgtgtttaatcataattattcattcttacaaaaaaaatcttaattattcataatgaaatctaattgatgttatttgaattcacaaagcatacataaacttcaattgaatttgtaaaccaaattgttacctagaaagacacaaaaacaggactttataaagttgtctttggaataagacggtcctatttctccttggatcctgatgttcctctatcctttattgttagaaatagaggacaagcatgactacaataaaaatcagcaaacgcaagttatcttttactttaaactgattgttttcagaataagcttacctattcattatttatttattcatttgtttgattttccaaacaaaaataaatatcatccttgtctttttagtttccttttttctgcaaactctattaacattaacaatgcatatatatatatatatatatatatatagaaaaaggggtgaggatgaatatgaatgggtcttgaagcaaaatggtattgtgatgaaccttaaattaaaagtgagactatgtgcgggggaaggagggagagaaagagaacaaaatctgtgtttatagtctataagaggtaagcattatctttaagaaaaaagagtgaatccgtattcacaaagtgaaggttgtcgtgtgacatctatgtacaccattcatggcaccaactgatgatgaaatgcagctttccatcagcttgcttgtcccgtttgaataaaggcttgaagcaagctctgcgctgcaaaggtttgatctggtgtcccagatatgacaactttccctccacttgtaccaacggaaggatcataaaccgtaacaattgcacctgaaatctggtcccagaacactagacacattaataccaacatcattgtaaaaccatttcagcaatctggaaacatttagagcaactagctatatagaagagtgacactaatagtataataacagacaagattcatattgtttatagggtactaaaatgcaaatctgaatttgtttatatcttggtggtgactatgtccaagcacatgtaagcttcaaaagcaaatatagatataaacatcttcactcaaaattttctgctgtttacaatcttaaaaatatatatatgtcaattaataaataaagatgtcaaagctaaattttgacaatggccaattaatccaccatagtgcatgcaaaccaaaatattgctcccaacaaatggaacaaaatggagtcaaagtttctcttaagatgtgagtttggacctaactcaaccctaaatgttagctcataggattatgattgtttcctacttatatactctatcttgatctaatctttaaccgatgtggaacttggatttttccaacagttttttaccccaaaatttattattattatttttaaaaaactttgtattttacctaataaaaattattgatcaaaacccacctttaatcaaatcacatcgtttaataagaaaaagtgaaaacccaaacacaatcctcaacctaataatccaccatatctttcttaagggaataattaagcacctgtctgattcgatccaaattgccaccatcttcaccataaacagaaccaaagacgtgttcagaaactattatctccacagtagtatttgtcaccgtagcaaacatgtttcctctgtcaaaggattttatcaagcacaaaggatgagagaaagatcagatgccaggagatatcttaacaaattgatacattttgtctatccagcccaatttcacttattttatagacttgtagttgcagttaggaatcaaagattttactaattgtatatttatataataatgtaacctatataaatattttttaaatcaatgaaaattgaaaaacaaaatcattaattatacaaccccctttctctacatctacctatattaatctctatacacgaaatcactatcacaattcacaaataacacaaaaactctctaaagagaaattttagggcaagaattactatatatcaaatgctcaactttaccaagacaggaacaataaaaaggaaaaggtgaaaaataacgccaagccattgtagtctgtggcgtgcagcattatactaacctcccacgttccaaattctcacttaaatccgtatgtaattctccattttgtaatattgtttcagcatgcacccctgcattctacaaatatacaaactcctaatcaatctcatcctatgcacattggaagaattagaagagttataaaagaaatttgaaggcaatgaacacaaaggaggtaaagaatacccgtggcagaaaccttccagaaggaaaagcagattttccacgggcaaaaggtttaccctttataggatccttattcactttccaattggattttggtcttgcttcagcaaccacctcattgggtgaaagattatccctgattctagaagtaattttatatagggcattttgtacacatctgtactctccagtgatctgcacaaaatctctctctaagtataaacttgactaggagacagtaacaaaagattgttggagccataacaagaaactcagtctattctgagtgctcaaatgcctcaacccagtgcaacaagataagatatttgttataagttacgaactaacctatgtcggcacacaaaagcatcagaatccaccaatcgcagagtgatgcacatgaatactttttttgctgaaagtaatagatattttccacatattttatagaaatgccttctgaaattgtcttcaatattagagaattttaaattgaaaattttgcaacaatttttttttcattttttaaatgaaaggacatcagcatatggcaacaaaatccttaagataaaaaaaaagtcaacttgaattacataaatttataagtgtacctgcaccaccacatcctcatctgaagcaccattaggaactgactctccatgcaatatttgtatgtcagccccagttacttctctcaattctgaaatcacctgaccttcattgccactaaagcaatttaccgtgcttgttgcaactaaaagccttgcagttacaggtgattccatgctagagacttggagaaaaccctttccaatgtgatcttcaataattctagcaaagacaagaataacagcatcttgtgcaggagaattacaagactcaaggctctggatgaaaaaaagccagtgctaaatcaacattaaaaattatgaaaatccaaaatgtgttttcaaacagatctatcaaatgcgactatatgttgttgcatgaacatatgcacatgaaagagggcacaaaaaacactgaaaatactataagcatgagttagttgtggcatagggaaacattctcatatgactgacctctacagcagaaatggtgacaatgcgttcggcatgctcgcttaaaggagctgcaaagataatagaagcacctgttttactttctagagctctgactatagcccctcttttgccaattacgctcccagctacattattagagcaaaggagtctaaacacaacttcgtgttctgcaccttttgagtcacggttagaggtttcattagagtttgtggtccgttcgtatatagataaaccttccatggaggttaacaatgaattaaggtgagggaaaagttcagcatttggatcagaggacaacctatcagaagagctaacagttggtgtactagaagtaactggaactttgcataatggcggacaatcttgaagacaatgagatacagaaatcagcgctttcttaacagccaaaattccaccagttatctgtcaatcaaacaagttccccgataaagaaaaagaatttcaaatagtcatttttcaatgataatggtatggtgttatttctgaagttcatgaacccaaacattgaactaggatctatgaaaaggtatgtttggattcacattagatgataaaaatcacgcccaaatatcagttaacatgattttaggtaaatattcacatgtttggctttacattgaggagctgatcttaagtccaaaattaatcaatttgaagaaacttcaagtaatttttacggtggacaaaataattttatactgaattttcctaccaagttgttttcagaataaaaatatctaaatataaatcattaaatcatatcacctcaaaatcaattttgcatatccgcggccaaacacaccctatatccctttgtaggcaatttaacacccccggtaaaaaatataggcaaaaatgcctaacactagacaagaaaaaaaaaaaacaaaaaatagaaagtattattgaaaaaaaaagtatttattatatcggaaatataaataattaaatatcattttttatgcttttataaagcaattgaaagcattcaatacgtatatataccaaaaaaaaaaaaaacacgtgttctctcccggtatcagatgaaatccagatgtaggaacaatataaagaagcctttagctttcccatgttaaaggggaattaaatgatactaagaaatgaaaacaaattcagtattgccatttggcatagtgacatatcagatccaatctactcaaatagaaatcccaattcagtcacacacacacattgtaataagattttgattccaaattaacactaaccaagacgttgaccgttaaaaacacaatttctaacaataacagattaacagtaataacagcaaaacttacttgaactaactcttcgtctttggtggcgcattgcggaggagggaaaaccctaattttggcaccggtattgttcctaatggccgttatgttcttccctcctttgccaacaacggcaccaatctgcgaagtgtgagctagcaacttcgagaaaacctcgccgttaacagctctgttagaattaacgcctttctcggcttcgaggtcccaaaccctctcgaaaaccctaacgacggcctcctgcgcgctggagacctcgacctcgccgccgtcgccgagcaggaggccctttcgcggcgagagggagccgatgacgaggatgacgcggtcctcggcggaggagagggagtcctcgcagtggattttgcagccggtctcgcggcggagctgcgacacgatggagccggagctgccgatgagcccgccgacggtggacgcgtggcacacgaggcggaacgcgatctgccccgggaggaccttgaacacggggcgcttgctagaacggttagtcgtggtggtgttgctgcgcttcggcgacggcgtcgtttggtgatcggtgtcggaggtggcggggtcttgcattgcgtggcgtgtgggttccagcgtgggatctttttttcatgtcacgcgccgcgagtggagtcactcacttggatcggaaggaagggacaacaaggggagcgagtgaggggtacaaggttaaggtttcttcattgtttggtttggttgtcttttggttactgatgagtgagagaaagagagagagagagtgtgtgtggagtgattaaatggaaattatggaaaggaagcaacgcggaagtgactttgaggattcgtggaactttttcttttcttttttactattttctatttaatggaatgatgtgagggggtactgtaataataaacccaattctcgagataaggaaaatgcttcgttttactaattcgaatctgaatctcgaatctgccgtgcaaagttcatatatgtcatctaacttactatagtaattgatgtttaattataagaaggaaaatatcttgagagatgagaagataaattgatattattagtaatatgtaagagaaaataaaatattgataaaatgcttgtgatttgtgagtgttcctatagctagatcgggttagcttttgtctaagagtctttaagtgaaaaagtatcctttgtttgattttttagatttagtatgacaatgttatatttagatcaaattgtttagcatccgaactaatgggttttagattgatcaacctaataagatacagggagatacataattcctatgcctcaaatgcataagacttgagatagtgacaaggatcaatatttgactagagaaatacggtctcccggccttaaagtacataaatacatcaaaattaaaacaatgaagaccatcatcattcgaccaggaaggtacagtgagtaatcaaatatcagcacttttgaagcataggctatagagtcatatggtaacaagaggagaaaaataaataaaagatgaatgtaatatgtactaagcaataaaaataagtgaaggatgtcaaataaatgaaaccgttaataaaatctgattgttgtgagaatctccaatgcgcgactttgttcattgtctaacgaacttgtacgaaatcgtcaacaagtcaatcagtccatggggtttttttttacgagggtgacggagattttaaagtttgacttgaataagtttttcatgattttatcctattaattctagtatattctttttacttcttttttaaatatatatatatatatatatatatatatatatatgacattaataatcttcagtttagtttatttttaaagatagtaacttcattattttttcaaatgttttttttgaagaattagtaatcattttaaaaaaatatatagaaggtaacgtaaaggtattgattaaatattttcaaattataaaattatagaaataataaaagtataagaaatttagggaattggattagattaatttgattttttataaacgtttttttaaaccatgctataaacagtttatattcactcttaattaaaattgataattaatacctaggaaattgattaagtgaaataaaataagatcttgcatttaacaagcatttgacaagtcacaaattcaacctctgattcatttgtttttaagtgaaataaatgtaagtctctatataattaagtagtatatttaaacttgaaaagttcctttatcctaaactggaacatcatctcatttcctaaattttaactacaaaaattaaagttatttatgtaaaactaaaactatttaaaattaaatacatgttctgtctacatagatacttagttatttgaacaatagctttaaggaattagttgaataaaataacatctcacagctaataaattgtaagtttgaggctttatttatctctttgaggtaaaatatatgtgaggtttttacaactatattttgaatttaatgatatttttaataaattgagatatctttagataattgagtttggctacacatgttattgataagaacttaatgatctaaagatatctctatccattactttcaacctaactaaactaacaatacatttggttgcaagttttgaaaactagctagatacattatatgttgaaacaatagtaactagcttctacagttcttgggaaacataactgggtatttagcgagtaaccaaacacacgctgagacactacctctttacttgaaacttatgcacacacaaaatttgaattgtgttgtcatctaccaatataatagtgaatgtgctaaaaaaaactatttatatctaaaatttgaattctttaattaaagcaacgcattttagaaaacaaaattcgcaaggataaaataatagttgtcaacaaacaatataataattatgactagattttaataataatatactaatttacagaaagaaaacttcattctcgattctacaagaatttttatgaaaattttttatttacctcttttcgatagaagttttattttctcagaatgtatcctaatttttggcctaattcttcttctgatgattgattcaacctctgataaaaaaggtataaaatatatcttggttctattttatctcttcaacaagttttgtaataagcataatgactctattgttcttaaggaaagaagaacctatgattaactttttggaaaatttccaaacaaacaatttcaacaaaatcttttagtcatatcaatcattattaatatgacttttttaaaaaaatattataaagtcaataaatttatcgtatatgataatatattatttgataataatgtaaaattattttataatgttaatatatgtgatttttttttgttattgtaattgttggcccgaaatatttcaaaagtttattttttttacaatacatatgtgaaaatgaatatataatgtttttagttaattttttcattaacattcatatttaaatacattacctcctttacaatattaaattaggtaccctagcctgtatttaccatttaatagtttaggatgattaaagttgggttggaaatgaagattgttggaaaatgaaaacaactacgcgaacagtgaacatgagacggtcggaacaggacgactggcaacttttatatatgcgattttttattttttgaaaaaaattgagaacctcgcaattataaaatactaaggaggcgtgtgttttaggctatgaaaaaagattttcaaaaatatgaatttgaaaatatcatattctcgtatttgatataagttttataaaagtattttcaggaataatttgattcgcatatatttgctctctatggacacaattacagaaagggtaacaaatatcttcaaataaaggaaccagcaaacattgctatagtcttcggctggtaaataaaattagaggaattctaaaatgatgtgtttccctatcattgataactgctaaataattgtgaatttataggagttaaatagtcaaattttgacttaaaattaattatttagcagttatttgtgattaaaagtaagaaaattaatttaattgaaattctggttgcagatacggaaaataaggttgcaattagcaaaagtggcacagaaaggaagaaaaaaaagaaagaaattctgaagcaggcccaatccaataggggcgctaagcgcgaatcaggcgctaagtgagcaactaactgcaggcgctgagcgtggcgttaagcacgaaggtggaaaccgttacacgcgctaagcccagctaggcgcccagcgcccgatccaacagaagcacagacccagcgtgcatggcgcgcccagcgcgcgatctgaacgtgctaagcgcgaggtgtggcgctgagcgcgactacgaaggcccgtaagctcacttcagccactataaatagagagacagacccaaggaaatatcatcccatctcagagcatcactctcagtacttcaagcctgagtttttttccctctctacattctttgttttgttagcctagcctttctttcattcccagttgtaagccctcaatggccatgagtggctaaacccctagctagggcctggcaggcctaaaaagccaacgatgtacaatgagcttcaagagttatcaatgcaaaggaatttattccaggtttttctgttctatttcttttcttttactcttgcattcattcttagatctctttttgggttttattcgctcgggagagggtaattctcaataatatttaagattcaatgcatgcatcagttttaggggttaatcgcttgggaaagggtaacacctaatagaacatctaaagaaaagaatcattgggttagcattgctaggcatagaatgataactcactgcccatgcatttaagcaacatctagaacttaatcttaatgcattttaattattgaatcttcacaaagacatttgggagataggtagttaaaataggcttgccaacgtgaggcatcaggggcaagtagtcaacagatgtgggtagaactaataccatttcattgataatgaatatcctatttacatgcatcgtaggccaattgggtttgtctggtcttggcttttctatcaattgttttttcctttatttgttttagtaataacactttattcctactttcactcctatttttactattttacttccacttacaattgagaggtattaaataagtgcaataaaatccctgtggacacgatactcggacttccgagctttactacttgtcacgatttggtgcacttgccaaagtcttaacaatcatgtatcaaaatttgtaagaatatgcgacttcaatctggataaaatgtttactagttttaaatttacaagtatattttgaatttaatgatatttttaataaattgagatatctttagataattgagtttggctacacatgttattgataagaacttaatgatctaaagatatctctatccattactttcaacctaactaaactaacaatacatttggttgcaagttttgaaaactagctagatacattatatgttgaaacaatagtaactagcttctacagttcttgggaaacataactgggtatttagcgagtaaccaaacacacgctgagacactacctctttacttgaaacttatgcacacacaaaatttgaattgtgttgtcatctaccaatataatagtgaatgtgctaaaaaaaactatttatatctaaaatttgaattctttaatgaaagcaacgcattttagaaaacaaaattcgcaagtgtaaaataacagattttaataataatatactaatttacagaaagaaaacttcattttcgattctataagaatttttatgaaaacctttcatttgcctcttttcgatagaagttttattttctcataatgtatcctaatttttggcctaattcttcttctgatgattgattcaacctctgataaaaaagatataagatatatcttgattctattttatctcttcaaaagtttagtaataagcataatgaccctattgttctcatggaaagaagaatctatgattaactttttggaaaattttcaaactaacaatttcaacgaattttttcaatcatatcaatcattattaatatgatttttttaaaaaatattataaagtcaacaaatttatcgtatatgataatatattatttgataataatgtaaaattattttataatgttaatatatgtgattttttttgttattgtaattgttggccaaaaatattacaaaagtttattttttttacagtacatatgtgaaaatgaatatataatatttttagttaattttttcattaacatttatatttaaatacattacctcctttacaatattaaattaggtaccctagcctgtatttagcatttaatagtttaggatgattaaagttgggttggaaatgaagattgttggaaaatgaaaaccactacgcgaacagtgaacatgagacggtcggcacaggacgactggcaacttttatatatgcgattttttattttttgaaaaaaattgagaacctcgcaattataaaatactaaggaggcgtgtgttttaggctatgaaaaaagattttcaaaaatatgaatttgaaaatatcatattctcgtatttgatataagttttataaaagtattttcaggaataatttgattcgcatatatttgctctctatggacacaattacagaaagggtaacaaatatcttcaaataaaggaaccagcaaacattgctatagtcttcggctggtaaataaaattagaggaattctaaaatgatgtgtttccctatcatgtatcaaaatttgtaagaatatgcgacttcaatctggataaaatgtttactagttttaaatttccaaaccattgatcacgtaattactaatgcttgaagctacaaaatcatgggttttcaaagttaaaaaaaaaatcaatgtgaacaaatcgaattcttaatggaaaaaccaatatggtcttaaagaaaaggcacaattaaaatattgattaaaatattttcttgatattaataaaaagtgttcattatagaaaacatgatctattacatgtctaatatcataattcaaatattaaataacttattaagaaatataaatgttatcacttatgtcaactattattaattttatttttatattgtgttattttaattgtaacaaaaaatttagttatttattcgtgactcttattgtcccaatatcttacttcaagattgtttcatatttttagaataaaaataataacaaaattgtttcataagttgcaaatttatttactgtgcatatgattaaaaaaaaaatcgttacacactcataagtaaattgttcgctctccccacaataatttttccatacacaccaatccaactcatttgatttattgcaacttgtatccactaaacatccttaagctatttcccttttcttattaacatttagaaagataatcatgaccccattttatgaaatctaaaacattgcacatgtaatttattgaagattttatttaactccagaaaaaaccttaaaaaatagatttttattttacttgtcacattaattttgatctcacgtattttaattcagtcaattgaattcttaaaattttatttttatctataattaagtatacttttttttatatacataattaagtatactttctattaaatatttaaatgatttttttaatgtgcagctgacatgattgtttaatactagtattgaaaatttgttttatattattattattagctctaatttatactaatctcatacacgggctctgtgaggatgggaagcttgatgaggctcttgagttgtggccgcggatgagggaggttggttgttttcccacggtaaggacttataccgttctcgttggcgcgttgtgtgagttggggagatggtggaaagaggctgtgagccgaatgtttatacttactctgtgttgattggttacttctgtaaggaggcgatgaggataaatgggcagagtcggagaagctggtcagatttggagtccctcaaggaaaaacacttcaaagcaaatgagcttgtatatacagccttgattgatggatactgcaaagctggggaaattgaagatgctgtttcaatgttcaaaaggatgcttactgaggaatgtttgcctaacttgatcacattcaatgtattgattgatggcttacgcaaagagggtaaagtgcaagatgcaatgttgttagtggaagacatggcaaagtttgatgtgaagcccactcttcatacttatactattcttgttgaggaagtactgaaggaatatgacttcgaccgagctaatgagattctcaaccaaatcatttcatcaggatatcagcctaatgtggtcacctatactgcatttattaaggcatattgcagccaaggaagattagaggaggctgaagagatggtggtgaagattaaaaatgaaggcatattgcttgactcctttatctataacttactaattaatgcatatggatgtatgagactacttgatagtgcatttggtattctcaaatgcatgtttgatactagttgtgagccttcttatcaaacatactctatccttatgaagcatctagtaattgaaaaatataagaaggaaggaagcaatcctgtggggcttaatgtaagtttaacaaatatctctgttgataatgcagatatatggaataaaattgatttcgaagtcacaactgtgctctttgagaaaatggcagaatgtggctgtgtgcctaatcttaacacttacagcaagcttattaaaggactttgcaaagtgggactcttggatgtagccttcagtctgtaccatcatatgagggaaactggaatctctccctctgaaattattcataattctcttctaagtagttgttgcaagttgggaatgtttggggaagcagtgacattgttagattctatgatggagtgtagtcatttagcacatctagaatcctataagcttctaatttgtgggatgtttgagcaaatgaacaaagagaaggctgaagcagttttttgtagtttactacgttgtgggtataattatgatgaagtggcttggaaagttcatattgatggtttagctaagagtatgttgatcaatgctcagaatttctgaatctcatgaagaagaatggctgtcatttacattctgagacatactctatgttaatgcaggctctgaatagagtttaacaaaatgattgtttatttttccctggaatggaactggtggaaaaggggctcccattgatattttttgactctgcataaggttgtacaaatggaacgcctgaaattttgtaatacattctgaataaactgactctgtctcagcaagagagctgcaaacatctctttcctcaaatgcggtaacactttcatggtcacagcaaatggtaattgtggcaacctcacaggttgagagcaaacagcagaatattgagatttgagaggcagtgactgtctatattctttcttacattgcattctttattcatatcacctaatgcccctaatacagatacgtaatttagtttcactgcttatctcagacactttggtgcgttatttttgtgttgataatttcttgtgttttccttctttgctactcaactagaatcaacttatggttttcaagtttctattaactatgaaattgtttttattgttattgtagataaatacatgtttgtgacaatccagggtattgatctttgtttgaaataaacgaggaaattttcgtcattaaacttattgatacaattaatgatgcgcaaaccttttttttaaggtggatgtgtttgctagtggtttttctggggggttgggatgctagttaatatggtaacatatataaatttatggagaagtgtgttttctattagctcgttcagtacaacactaacatgttttattaggtttttctttagttaatgacttaatgctagtaatgattgtattaatgggcaagagaggaggaaaaactgtttttggttgataagtaatcttttggcacaacagcaagttattcacttattgatgtagctatgctgcagtcctctggacatatctgataaagatgagacttgtctgccccaaaagcagctgcacctgtacccttctcttaagcagccactgattgttgtcccttcaatttttttcattggttttctgctgtacttcctaaaactataattgcaggctcaacaataaattccagtcaaagatttgttggtataagtagatgttgaaatgtaatcagggaaatttaatttattcctataattaggctaatttgcatttcttagaattaggtggatttgattttataatttttattccattttattttcttaattaggtgagatgaagatgtctataaataccataagtaatctctcttaacacaagtcaaatacaattcggatttattcctttcaagtctttctaagcatggtctcagaggggtacaatcctctgtgacctgtcccgtcgctacttcactcacttttgagctccctactcatgccgttgccatgtcttctacacagctggtttcattttgtttgttgatggacatttgctacttctgggtcaggctgttttcctttgaacttatttgtggtctttggatctctctttcaaaagatccactggtttggctgttactcagtttctgtttgatatgctccttttctttaccttcattacaacatttggcttctttattctacctgtttttttatgccttcactgtggcatggtggtcctttttcacagcctttattgcagcatttagcaccttcattataccgccttttcgctacctttcattgtgccagttttgcactgtcttttttgcagcatttgacaccatcattggctggctgccttcattacagccaattagcgtagtcttcattgctgttgcacctctgatcaatcgaaaccactgccagaagattcaggaaatcattttccagtgagagcttaccctacattccaccaagtggcttttatcatagcatagcaaacttttatgatcttgcttgcgggaatacaattcactagtttgagggggaagtgttgaaatgtaattaggaaaatttagtttattcctaataattaggctgatttgatttgatttgtataattttcattattttttattttctttgatgcgatgaagaaatctataaatgccatatgtaatctctctttgaacacaagtcagaaatacaattcagatctattcctttctttcaacaaatccatttcaaaggtaaatagttgctgtatcattgggagcttagcaccctacctttgtctgttggagtaatcagcgaatgccttttggattaatgcgaggtagaaccactatcataattcttctaactacacctaccttatttttgtgcaactttgtcaacgtgattgaggagtaaatctaaaagtttgcaagaactgaagaaatttttttgcatatagaaatttctcaagattcttttattatttcgaatttaaaataataaattaatggccttgtgttttaccataggaattgatttctcacactgtatgcacattttaatgtaaaagttatgattaatttagataaatcacatttaatagtttaaaattaatttttgttaaaattaatatctattgatgttatttaattttaaaaataatgaatactaatttgcatgataaagtagcctcttgtggtggggcattagaaatagtaatatatgggccagatcataaaatctgctattgtctatctaatttaaatttcattcggccaatgttatataatgctaccaatatgtggttttaattttttttaattccaaaaataccatctccttgacagtacgaagcatgcaatccagcatgcccttgagtcagtgatgcccacttatcaccatggtgctttcccggatctagaactattgtgtaaccatctattttaaactaattttcccccaatggaccaatgaaaataattaattttcccccaatggaccaatgaaaataattaattttccctataccaacaaagtttaactcaagtaaagaacaagtgtgaaagctacagttgagagaagtttacaatgtttaggttggaaacccgagagaacatttggtatcccaagcattgattaaccttacaaagtacacaaatatctctttagattaaaagaaaggctagtttcttgaatgaatgggaaggaagataatgatgcacagcaaaattttccttcaaatttatgttcaaataacacaaacgttaacgcacaggaacaaaccaacaccggcaaagggtagcaaaagttagttacacatgagtataggagttcaaatactgatctaaaataaaaataaaagatcgcctaaaaatattgaaaataaaattaatcggatattttttgaatttgttcagattgagttttgaataaatcgattcggattgcgggttgacgtttgtgaaatcgaatcaaacgcaaatattttatttatctttttttttaatatataggattgaattaaatccattctaagtgtaatttattttatttttttcatgcacaacacaaatccatcctaagtgcaatttcatgaccttaactatacttgtgtgttgactggaacattaatttctaatttttacttcatataatttatttacaagaagtcaaaacacatcaaatttttaaatgtatatgaatctattagctactattggactataatgtctaaatgaggttttgattgtttggtagtgctagtgtgaactttttttacttaatttaaatatttttttaaatcatctaaagataattaaaaatattaaaaatagcaaaaatcaattcaaatcaaaccacaaaatattggtttggttcatattcgatattatattcaaattgaaacaaaccatatcgcaaacacacttacattttaggttgtcttgctagtatatacacgactaaagattgcgaaagttgatgttttttttaattaataaatgttagtttgttaatcttgttaaaaagatgagtaagagggattcaaacccctttctcccttcacccttagccactctttcccaatatcaaccatcaagctagtcttatatctcgttgagaaagttgataatatatccaaaactgaaatttttcgcgattgacaaatgcacagctgcaccagcgctcctcgcagcttaaatctcacttgctatgtgctgaaccaaagccacaccagtcaaagatcatgcctctatgcagttcagcgatgatttttaccaattcaacagtcttttgaatagcataaactgtgacccaaagcttacaaaactgtgaaagtcaagtcatcccagaatgcgtctaatatgaaactaatgaaagcttgaatcatataaagtacatgcacaaatatctttcattccctacagatccttctatatctaaaatttgtggcttcctccgaataagtcaagtattttaatatttgtgtggtgctttttaattttcttttttaaattactgaactttacaatgttgcatccttgtggtgtaggaacagtgaaatatatatcagttgcttctggcctcatctaatttcttttctcccatctaaacataccattcttagtgatatctatatatgggtagatgagagaaacaacaaagggttgtattttacacttctaggatgcatgtgtataatgggttattacgtaatccaagtataacatctatcatattttatcttttctttaacttaaaccatgtcaaattttctttaatgtacttttttgaagtattttctcaaatttctttatttggtttatcaatttgttcctttgatactgataaaaaaaattgttcctttgattgatcaaacataaaagtgcatagttaatttgttatattaaattacccaatagctccttggattttacttgaaaacttttacgaggcttcaaagttcatcaatgaggaatatatttcctaaattgcgttggaaaaaaaatgatagtcttaatggagactacaaatttacggttaaataaatatttattcatgatttccttcaaaataaaattatgcatgatcatttaattttaaaaattaataacaaagatatatatttcttttatatttattcaaatcttagcaaaaaattatcaaattactcaaattcttaaaaaaaaatagttattatcaattacacaagaggacaatatccatatatattatcagagtgacatatcttagtgtcgtagttaatattacgatacctcgattttctttttacacacgtcaaccaattcataccaaacctatctcaattgtccattacaacataatctgacgacatacagagtcgatccatgtcaatcaatttcattggtctagttccgacacaatattataaatcaaacaacttttggtcatgcttcaattttccattacaacataatccaaccacatacatagttggtccatgtcgttcaattttattggtgtagttccaacacaattcattatataaatcaagcaacttcttgggcatgcttcatatttccccttttgcttctctgtttgtcattgaaactccttcaccccctcatatctccccaattcaccagtggcaagccaaggcaaaactcaaggagccagcactgcaaaaaagggtatctcatgaagcaacaaagccaatcgccaatgccccgttggtagtatcgctcgataccttagaactaacaaatatgttgaccatgttgattctaacactccatgtacatcgcttctattattgaatatcttgttgtcaaggtaattgtccttaactacattcaatttcttttttgtgttttgtagctgttggatctagggtttagaaattaggacttattttacctaatttatgttaataagtttgtttcaatgataaacttcaaataattgaaatgatgaatttactttaatcgatattaattgtttttggaagttttattttacacttggcatgttcaagttctaaagttgactagaaatgctacgatggccaagaagactcgaattatgtacccattttttacatgttacagaacaattggttcgttaaatatatatttgatccatgatgtttgatggtgtacatttcctgggatgtactaatgtgagagctcttagacaaaataaactgaagaagttctattacaatgaaggccatgacaatttttgacaccataccaaatccataggacctccggggatgcacacactcgtttaccaaattactagaaaaggctatttaccgttgggagaagtcagcctattttcctccagatcatgcttcgatgtagaatccccacccatcaattccgagaagccctccaccttcacaggcggggctctaaccatgctagtgttcctatatgcaaacaataaagtcttaataaagataagataaacgtcaccctaacagcagcattcatttatttgaagtaacttacggtgactgaattgaaggaatctgtaaggaacccatgtgtctgaactgagtgccagattgaggatggaaatttgacattgcagctatctgttgctgctgctgctgctgcctaaactgctgaatttgaggatgtctagaagtgaaggcattattaccatcaagtggtaagtcttggttttcaatcttgacttgaaccaatggtctttctttatctatatccatagcagggcgaggagtagctgctgctgcacgccttcgcaatctctcaaactgctgctgttgttgttgatgttgctgctgatgaaaagccatattttgggaatgaatcatctgctgcatctgcggatgcatttgcctctgcatttgaagctgcgcattaacaatacattgctggaatcattaatcaagcttaaagagaatgtattgaaaagctcttaatgaacgaaatcaatcagataatataggatgcaaccaatcacaagatcacataaaggatgcatgcaaaaaaaaattcagcacaaattctcttccttctcatgataccataattggtgagaggggcatggcaaattcatttttctaatgcataaaagggctaatgtcaaatcattgttatcaccatctgctgagggtaaaaaaagaggaaagggggatgtctgctgtatttctccaaagctcaaacatagaactacaacccaaataggacaaattaacctaataaatcacaaaacttataacaaaatgaatgatcgtgaacaaatatataaaatatagcaccccgtactacaaattgaacatgactgaaaaatatgcggccacagattaaaaaaatggcatgtgaaccgcagtctcataatattcatattcaaataacactcaacaacaacaacaacaacgccttatcccactaggtggggtcggctacatggatcaacttccgccataatgttctatcaagtaccatacttctatccaaatcattaagttcgagatcctttttgataacctctcttatagtctttttgggtcttcctctgcctcgaattgtttgtcttctctccatctggtctactctcctcactacagagtctaccggtcttctctctacatgcccaaaccacccaagtctattttccaccatcttttctacaataggcgctactccaaccctctctctaatagcttcgtttctaattttattcaaataacactcgatatgtagaaaatattttttgatggatgctataaataatggtcactggccagacaaagaataaatcacaattcaactagaggcacggggtaattctgttttgaggaaacacaaaatacatctacaatagcgaagggttctcaaaggatccaaaacaaggacattctatgtctccctgcttatgtccttgttcatgtccatgcatcacacaagtaacttaaaggattaaataatggtcaaagaagtagatgtaagtacttgttgaggcagccgaagggaactctgctgttgttgctgtagctgtggctgcattccatgaatttgttgctgactctgttgtacattattctttgagccatctttaaccacatccactaatggtgtaaaattactgtgagcaaagagcagaaaatattaaaatgcatccgctgcatgtttaagatgtcttgatttaaatgcaacatataaatcagggtaacatttttgcctaaaaaatccttgcacaaccacaagaaatctatccaccaaaatgttcacagcaccacaattagtcatcatgtatccctcttcctcccccttgcagatttctatttcttgaatgtttataaacaaagtaatactatagtattagagcaatcgccatgaacatattaatgcacagtaagattaacatatttatccatgctaaaaacatttagtaatgaaactaaacacaagcaaagtgcttaaactcacctaaaccctactgttttcagcaacatcttcagaagctcaatggccgagcactgtttcttgtaactatcagcaagcactctcaaatttgatcctattttacttatccgtttactcaacacttcagagaagtcctcaactgaaccttccatggcaccttcaaaccccacgcccaacaaaatccgtgccaccgccttctgcgacaatttcgctgcttgctcaggcccaataactttcccattcccttcagctccaaatttcccactcgacacccctcctccatgctccacactaccaatatcaggcctaaccccgagcctctccatcataacggaactccttgtcgccgcaataggaggcaaggtatcaagaacactaaacaccttcacaaccttctggttactactattattctccactctctcactcaacggaagcgcgctatcaggcacgcagttcaacgcgtacgctatctccggaaaaaccggggaatcatcatcagcaactaaaccaccaccaccgttcggttgcagcgcgtgatccgtaacggagttcacatcttccttaaacgccacgcgccgcttcttatgattagtaacgtagttaatataagaagccatatccgccggcgaacgcgactcgccggaaaccaagttcttattagctttgtacttttcaattactagattataccacgtttccggaagttcagattcaacatacctggatccagtcgaggaagaaggcttggattgattctgcattaaattgaaagaacaaaatgtaaatacggagaatgaattgaaagagaatggtgaagaggtagggtttggaggaccttagagtcggcgtcgagggtgaagtagatgtcgtcggcgtgcagttggaggtaactagggttgaggcgttggatagagagagagggattagggtttggggagagggaagcggtggctttgtcgaagaggagggcgcggactctgagttggagagggatgtgagtggtggaggtgatgaaggagtcccaggcggaaggggaagagaggaagggtgcgaagttggcgtaggtggcgtcgccgagccaggttcgccacacgccgcacgtgtcaagcttccgtgccagttcgtagccgcgaccgtcctcccccagcatagccattgccgccgctgctaccaccgccgaacggagtagtgtaatatccctctaaagccttttggtcaaacgcctttaactggactctctctacttcatctaactgggctggcccaatcaagttttagcacttgagtttaatcaattatcaattattttagtacataaatgttataattaacttaactagagaataccagttaaaatttattaaccttattttgaatccagtgaaattaagtttaaattctttaaatgacatcccgagtttaaatatctttttgataaaaaaaatgtggttataatttaataagagaatttctattaaaagagattaattattttttttggattaagttaattatcatcaaatttaatgactatttgtacctataatatgattaaaaaaatattaatataatcctattttgattcaagtgaaattagatttaaattctttaaataaaatttggagttaaaataccttagataaaaaatgtgattataactcaaaaaaattctattaaaagacaccaatctttttttttctttctaaaagaggctaattttcataaaatttattaaatatttgatacttataatatgtttaaaaaatttaatactataattcatttgtttagggagaacagttatgttaagaaataatcaaataggataaatttaacacaactcacatacatattttcttttagagaaaaatgctctcaatgtaaaagtatttactcaagcaaccaatcacaatttatcacgttacacaataattctttaattaaatcaagtaataaataatttaatttaaaaaaaaaacaaaacaagtataataaacaatcaaaagaatcatactttctgttttcacattccggactaatcataaataaacaattgttgacatgatacttccagaacataatgatatgagttgtgctttgttttatatgtacagcaaagttggcttctaatgggcgtgccaccgtcacattttttgctaatgcaatgataggaaaaaaaaagtgtttaaaattcaggaacaaacattttgatgtggatagctcttctaatttgattatctcattctacttatataactaatattacactgcaatctttgtaggattgttgttattggtataaatattcttttttttataataagtaaaaatattccttctgaaaacatgaagaagtcattacaaaaatgcttgcaataagctcattgggaactagagaattactgttagggtcagtaaaagagtatccaaggagagaatgaaatagcacaagagggaaattcagaaatcaaagaaaacaaaaaggcctaactataccacctgcaccccaattatactgaatttttcaaaagcaataagctaatcttggatccaaggtctagggcaatatgctggatttcaaccccaaacttagtggtgaactttacctgtaatatcactttctaccctgtgtaccttaagaaacatcaagatccaccagactattgattcaatgccaaacattcacatataaaactatagctatagcagctctcatagtcacgtatattcatgttcatatatgttgttatagtttgctatgccccttctaatttgagttgcagtttctacgagagtgctaacacttccaagtccatccaccatgttaaacctatatccaagtaagaaaactcaccaaaagaatcatccacgacatgtaagcttgagcttgtcattaatttgaccaccttagatcaatttcgacttaagcatatatataatagcaaaaaaataaaataaaaaagttatatcctcaaattattttaaaaataaattaaattggacacctacgtgatgaattataaactcaaaataaatcaatttggcaggatgaaattaattaaatgtcaaatgaaaatctcatatatcttctcttattactcaaaaataaactccactataaagtattagcctgaacatttgcttggcaggatggaattgtagttgaatgcaagactatggttcaacattttcttttctcctctctcttaaatcaattgagtctataataaggcaattgtaatttagcaaaacttccttttttttttttctcttggagagatatactggatggtttggtgacctatcctcatcagattagtaagctttatttatctgatttacagcatttagtttctgcggatacttgaataaaattttgttaaagcaaataaaaaaacatgctatccctgctttgtgtatagcaaattagcaatcaatgtgttttggactggctttaattgcataaatacaagagcatttatgatttgttttaatcactatcaagctgtttttctaatgacttttatgacagttttaaaacgtactaccatttatgttctctgtatattttttattacgtatgaaatatgaaagtgtgagaagcacaaattttcattgatcatataattaaaaataattttaatatccataatgataacaaaagacgagaagatattatagtatcatatttcatatcacaaaacatgctatagacgggtgaggataaaataaatttagttatcatggcctacgacgaattgtcattatttgagttatcaaaaaatttcaattataagaatgttgccttatgtaagtttcaattgcactaaacacaacatatttcccttattaaaacgaatttttttaatcattttaattttgtgatctaacctttctattacatttcatcatctatcatggtatcaatatattttatgtcttctccatatatctttttttcttataattaaaaggtactgaaaaatgtgtgatcataagatcgcttacgtgatagaaacagaaagaaaaggagtaggtgcgtataagaataatatgtgtagaaaaaatggcatcccttttgttctcatatgtattgattaaaggatcttttaccgtcctaattcggtgatttgagatattggcagcggttcatgccacgataattcacaccgtataccgtatatatatatatatatatatatatatatatatatatatatatatatatatatatatatatatatatatatatatatatatataaagatttgaaacgtgtcccaccgaacaaataataatcagtgtaagtgaaatttcacattagatataaataaaaaaattaaataacatataaataaataaaaaacccataaaatcaatctttaagattaatttggttggatggctgcagtggagagatgataacaacaggaccagaaagacattaagatacgtaagtggtgtagtgtcgattcttctatttgtcggcattggacaacatgtgtctactaacatttggggtgtcaaaatatattaaattttatattggagcaatcaaaatatttaaaagatcttcttaaaaatcactacctagtatttatcaagttgactaaaaatagcatgtaggattattctcaacaaaatatatttttccgtaatctgaggtgcaacaaagacgatattagttgttgaatatggcaaaagcacacgtgctgatcttccctcttccattgccaggccatttaggctccatgctcaagctcgccgagcttcttgccctagacaatatccacgtcacctttgtcgataccgagaacatccacattcgcctcactcgtttcggggacattcaagaactctcagaatgctaccccacgctccatttcaagaccattcccgattgttacgatgaagaaggcgagcaccctggattcggagaccgtgttggggacttcattacatctacggctcagcacgccaagccctttttgagagacattctggtgtcccagcacagtcctggaattcccaaagttagttgcattattcaggatggaatcttcggtgccctttcctctgattttgctgctgagttacgtataccactcattcattttcgaaccgtcagttcctgttgcttctgggcttatttctgtgttccaaagctcttagactgcaaagaacttcccattaaaggtatggagtactctactcagattcaatattcatcgctagctctcactctacttatgccatttttaaatctgtgctttccattcagtatatgttccaacctctgctgttgagaaattacagaatacagaacaaaattttctttagcagaaagttgtattcatttttaattaattcccccccccccccccccccccctaattacttgtacatatacagtatagagtcaatttcggaagatgttattaatttatatggtagttttaaatattggtcgttgtcgcattgcgatttcgtcccgtgggcaaatatggtcaatgcaatcttaattgcagctgtatgcggttgttaaccgttaaaaaaccttgatgttgaggactgtgaccatattttaaaaccttaggtagatgcaatattgaaagcagcaactattgatactggatgatccaataggaattatagtatattcattcaatcaacacttatagacacaactaggaactatcaaaacaggagttggtatcagtgatgtggtttaaatacatacgaagaaattatagtgtggcgtattgtaagtttgtaacttaatttgtaggagaagaggacatggaccgcataataaggaatatgccaggcatggaaaacttgcttcggtgcagagaccttccaagtttctgcagaccaaacacagaggggaactttctggagtgggcagtgttccgaacccgacaatcacttgcagcagacgcactcatgctcaacacatttgaggatctagaaggctctgtcctctcccaaatgggtcagcacttccccaaactctacaccattggccctatccaccaccatttgaaaatcagaaaagcagaatccaacaaagcaaaagacattcccacgtttaagaacagtcttttccaagtggacaggagctgcatggcgtggctcgaagctcagccacaagggtccgtcatatacgtcagcttcggcagttccacgattgtgaaaagagaggacttgatggagatttggcacggtttggtgaacagcaagaaacggttcctgtgggtgatgcggcctgacattgtggcggcgaaagacaatgatgaccggataccggctgaggtggaggaagggactagagagagggggctcattgtggggtgggccccgcaagaggatgtgctggcccacaaggccgttggtgggttcttcacccacaacggctggaactcaaccttggacagtgtggtggctggggtgcccatgatttgctggccttactttgcggatcagcagattaacagcaggtttgtgagtgaggtttggaaacttgggttggacatgaaagatgtgtgtgatagacacgttgtggagaagatggttaatgatctcatggttcataggaaggaggagtttcttaaatcagctcaagaaatggctatgttggctcacaagagtgttactcctggtggttcctcttactctagttttgacgatttgattcagtacataaaatcagcaagcaaggaaaaaaattaattaatactagcggaattgattaaaatttcttctagtaagcacggttcacttccaatttgggatcctgaagatgtttctacactatttcttttgttatactttctgatgcttcggtctaccttggcagcgattgggctcaagttgtttttggacttgtcattgcaggcaatgcagttaagcactgttttagtcaaattaaccaaaaaaacaaaaacaacaaaattgttcttcaagaagggttattccatttgctaatttttttcgttcatagtaaaaaaatattaataattaacatcaaccaaaattggtttgttcaggaccagcaaaatggattcaaatcccataactatttagtgtggtgtatgctttgattttcttattaaaaaaataagtttctagtagaattcaatacataatttctgattcaatgtcaaggttatctaaaattatttcaattgaaaattaattctagatataaaatcaattttaggatgattcaacatgaattgaaaaacacacacatacaaaatatctaagttttttttttaaagcaaaatatatgagagaggatgctaaagaatgaagcacaaggaattctcattcaagcaccagctaggaactgaacaaatatactagagttgttgcatattgtgcagatctacaccagtaccatgcaaagcctatatccatacccctaatatagaaaggaaaagaaataggaactcattgttgatgtaaaacggtatttgagccaattatccactaatacaagagatatatatagtgatgcttgctccaattcaagactaggatctcacatttgcttcatgacttcttcccagtttaagtagaatcacaggaaaatgacttgtctcttgccacccaaataaaaggctatagaccacattaaagcaaaacaacatacatgactcatccacaaatcctttagcttccagattctatagcattaacttcaatattagaattgaaaaaaactccttagcctctttcgtcctcactgatttagggggatgtattggattaagatttcaaaggattttaaaagacttttttatgattaaaaagtcttgtggtattcaatcaagacttttataaaatataaacaaatcttgtggtattcaattaagacaataaagaattttttttcagggcaacaaaatctgttggtattcaattgagatttcttaccacttttaaaatgtcttttggtattcaaaagtaaatagattttgatagattcttttgtggaatggattttgagagactttttagttagaaatacacataaaatactcctccaacaatctcacccaaacccttgagacttttcataatcttccaaagactttttcttctcctgccgaacaagacacaaaccactaccaggttcattctcttacaacttttcaatcaattttacctatttttttaatggcaatcgatagtcaatattgttcatactatatgtatattacgcaaatcaaaagaaaagggtgctgtatatgcttctcaagatttcgtattcatattgttttcaacgttcaggcaatgaatatgcatcaaaagaatggcaattgatatgcatcaagatttcatattgcttttttttagtactgtatatgcaaatcaaaataaaaaactcttttttttttctgtttcttcaacttgtttttttacaacgtccattattattattattattttcttgtgttattattaaaatgttaattattaatgtgttattattatttttttgacagcgtgttattattattattattgtgttaataattttttaattgttattgtgttattattattgttattttgttaatagtttttttttaaatgattttatgatatatgagtattatttttatggaaaatgctaacatgtgcccttaagacacttgttagtgtattatgtatagaaattttgtattgaaagttgtgcaatttacttttttaaaagtcaaaaattgttgtttttaagacatagttactattggaagtatccttaacatgtgccctaagtgcgcatgttagcatgacccttattttattattaggtagttttttattggtttttctattgaattgtatattattcgggatatagtcactatacttttgacaattaggaaacaataactatttttgtcaaataactagtttcttatatatatatattagcgatcaaatgggggattcacaagaaaataacaaaggaaagagtagagacaaagataattatgtatcttggactatggaggataccaatgagttgttgcacctcttggtggatcctatgaatagaggattgcgtgatgccaatgggtcacttagcaaacaaaatgtagaacgaataatacttcctcaactcaatgcaaaaactaaattccctaaaacttatagtcattatttgagtcggatgaagtgatttcgaaaccagtataacatgatgtcaacccttatgcgcaacaactctggctttggatgggacccaattggaaaaactttcactgctcatgaggatgtatggaaagattacttaaaggtgagctaagttcataatcttttaaatatattaatagttataaatttagtaaattataatatttgtagtatattaacaatgattttttttttagtcccacccaagtcacagcaaacttcgaggaaaaagtatggttgattatgagtatttgaagatcgttgttgggggtggagtttctagcgggaataattctatatcagtcgatccagatgatactgatgcaacaacttttgagccagaaaatagaactgttgggatagaagaattttcatatgatcctaataatgatacattcataacaccaaataactatgaaccagcatatcagcctccatcaccaaaccaaccaagtccaccatcccaccccctttagattcagaggttcccatagaaaaacaaaactgtcacaagcaaaggagatccgagtatggagggagttcaagcgctgttgggatcaacaatcaaggcaacgttctggaaaatctttctgttggcattgggactattgctgtgaattttgaaaaaatatccaacatgatggagaaaagagaaaaagatagagatagagatagagagctcgagggtattatttgggatgttataaaagaaattccaaatttggatgacataacgcgtttcaagacagctgaattgttaaatactaaagcaaaaaaggatttttttcttgaagatgtcaccggaagaacgctcatcttggataaactttaagttagggaataattaatattttgatcatctattattaacatattattttataacaaaattataattataattgtgattattataataatatttatgattattgatacacacactttaggattgcattggagctattgatggtacacatattcccgcatcagtaaaaggacgagatgtaagcagttatcgtgatcgtcatggaaatatatcacaaaatgtattagctgcttgtaactttgatttggaattcatgtacgttcttagcgggtgggagggttcagcacatgattccaaggtgttaagtgatgctttggcaaggaagaatggacttaaagtgccccaaggtaagtattatcgggtggattgtggatttcctaatcgacgcaaatttttagccccatatcgaggtgtacgatatcatctacaagattttgcaggtcacggtaatgaccctaaaaatgaaaaggaattatttaatcttcagcatgcatccttaagaaatgtgattgagaggatatttggtatttttaaatcgcggttcacaatttttaagtcagcacctccatttctatttaaaacacaagcagagcttgtgttggcatgtgcagcacttcataattttcttcgcaaagaatgtcgttctgatgaatttccagtggaacctactgacgagtcttcatcttcatcttcagtgttaccaaattacgaagacaatgatcatgaacccattgttcaaacacaagagcaggaacgagaagatgctaatatatggaggactaatataggttcagatatgtggagaaatgctaataattaggcgaacatgaagtgagaatcactttgttattatttttttaggcaataatgactttgttattaaaaggtttaaaatttctatcgtttttattttctttattcaaacattataatttatttatcatctttttcattcacttttgtaacttccgttattattttgtttaatctttcaaaatcttaaaaatccataaagtactttgaaatcttaaaaatctgtgttagaaattcattaaaatcttgggttaagaatcctgattgtaaaaagtcttttaaaaaaaatcttttaaaatcccacaaaatcaatacaatcccacataatcttttaaaatcttcaagattgtttttgtcaaaatattctctcaaaatcccaatccaatacaattgaagcactgcatccaaattttgcacaaattggttccactgatttgcacaaatttagcaggcctaaatcctaatcatcacttcaagaatgtaggcttcactgcttcaagtataacacaaccatgagctgccaaaaataagatttttctcaacctaaattcagtcaaagctatgtttttacacgatacaatagactagtacaaaaggccaccttattaacaatgaaaatggtgacaggtcccgtgaatcagagctaagtaatgtgtgatgttgaatcaaccacggctagtaagacaggtacgtacgtgagtgatatacatcattagctttcccgtgcgctcacatgagtgtctttttgtgccgattgtattcggacagtttttatggtatctttaataatctggaaagatttaatactattaattttttaatcaatcaaattaaatatcatatttttattaattatatttatttttaaaactaattcttaattattattttttaaaattttaaaattataacttttttaaatactaatttgaaaaaaaaatgacatgttaaaagttatcaatttcaaaaccttttaaattattgaaggcaccgtacaaattgtcttggatttgttgacattggaggacatgtagactacactacaactatgaagtgaaattaaaatcagataaatatatatatatatatatatatataaaagaaaaaaattataaatttgatttttaatatttttttattaaaatatgatgttggatttacttatatatgatgtaaattactcatttgtgtaaaaatcctttacgtctgacttaaccaatagtacaatatcaaaggcaatgttaactagagttgcattgcagtaaagacatggttgaaaatgagaagaacaatgacagaaggtgaaggagcgcacgcgctcatcttcccttgcccattgcagggccacgtagggtccatgctgaagctctctgagaatcctaccctacgctccattattcattttcgaaccagcaacgcgtgttgcttctggccttatttctggattccaaagctctttgagtgcaaagaacttcccattcgatgtatgtatgtatatatggactcacgctaattaattctttcgtttctctcaccctacttagttatatatatctacgatgctacatcatacattcattctcgtaccttttttaaatttgtgcattccatttagtatatattaagagaacataggttgtgccaccatactgtaaaacagttttataccatcatttaattacaactcatataagtgtgctggttttggtgataattattttaaaagtcatgtttcaatataccaatttctgttgctgagaaattaaagaacggaaaacagattattccttatcagaaaattgtatttatcgttaattataatgtgaccgattaagatatgtaactggttgaaggagatgaggacatgtaccgaatcatatgcaatatgcctggcatgggaaacttgcttcgatgtagagatctcccaagtttctgcagaccaggtacagaggggaacttgtctatggactgggtttggtttcagaccaaacaatcacttgcagcagatgcagtgatactgaacacatttgaggacctgttctctccagatacgtcttcactttcccaaactctacaccaccatttgaacgtgagaaaatctgcagccaaaggaaatgatattcctttgtttaagaacagcctcaagggtcggtgatatatgtgagctttggaagttccacggttctgacaagggaggagttggtggagttttggcacggtttggtgaacagaaagaaccggttcttgtgggtgatgcgtcctgacttggtggtagggaaagagaatggtgactggataccggcggagctggaggaagggactaaagagagggggttcatggtggggtgggccccacaagaggaggtgctggcccacatggccgttggtgagttcttgacccacagtgggtggaactcaaccttggagagcttggtggctagcgttcctatgatttgttgtccttactttgcgaatcaataggttaacagcaggtttgtgagtgaggtttggaaacttgggttggatatgaaggatgtgtgtgatagaaaagtcgtggagaagatgattaatgatctcatggttcataggaaggaggagtttctgaaatcagctcaagaaatggctatgttggctcacaagagtatcagtccaggtggttcctcatactccagtctcgatgatttgattcagtacataaaatcagcttgcttggaaaatagttaatactagcactctagcagatcaggacgtgtagttgcaggcaatgcagttaggttctgttttggtaaaagcaaaaacacggaatgtgggaggaagaaatttatgatatgataggaagagagatagagagaaatgagaggtgttaatggatgtttaaaataaatgggggtatgtgtatccttactctacttcataagcaaatataaaacaaggttgtgcatgctgaaaagttaagactgaagaccttgttatcctgttactctgttaggctgctagtgttggaagttctctccatccactctgcatgaataatcattttattttgtggatgatggtcaattaaatatttcatatgctatcattttatgaattttttacacttcaaatgaattgatgcatgatctacgactgtaacatggtgacattggtttctcacagaatgaagccaagtagaatttggtattttaattgtttttgaaaaaaacaaattattgttgttaaaggctaaagggaaaggcctactcaccaagcaagagagtcagaaacaaagcaaacccacaaatatcactcaaaaccgagaataagcaaagctacaattgtcacctaaacaaatgcaatcctcactgattttgtcacgtctgcataatactacacacagattcaactaatggaatcctcactgattttttcacactattaaagaggcgcaagaccaaagagatggattgccaaagttgatgatttttttttaaatcgacaaatgttaatttgttaattttgttagaaagatgaataagagggattcgaacccctttctcccttcacccttaatcacttcttcccaatctcaatcatcaagttaatcttatatgtcgttgagaaagttgatggtatatccaagactgaaaacgcgattgacaaatgcacagctgcaccagcgctcctcgcagcttaaatctcacttgctatgtgctgaaccaaagccacaccagtcaaagatcatgcctctatgcagtgcagcaatgattttcaccaattcaacagtcttttgaatagcataaactgtgacccaaagcttacaaaactgtgaaagtcaagtcatcccgaacaaaaatgcatctaatatgaaactaatgaaagcctgaatcatataaagtacatgcacaaatatctttcattccctacagatacttgtatatctaaaatttgtggcttcctccgaataagtcaagtattttaatatttgtgtgttgctttttaattttcttttttaaattactgaactttacaatgttgcatccttgtggtgtaggaacagcgaaatatatatcagttgcttctggcctcatctaatttcttttctcccatctaaacataccattcttagtgatatctatatatgggtagatgagagaaacaacaaagggttgaattttacacttctacgatgcatgtgtataatgggttattaagtaatccaagtataacatctatcatattttatcttttctttaacttaaatcatgtcgtattttctttaatgtattttttgaagtattttctcaaatttctttatttggtttatcaatttgttcctttgatgctgataaaaaaaaaattgttccttttgattgatcaaatgtatttattcaacataaaagtgcatagttaatttgttatattaaattacccaacagctccttggattttacttgaaaacatttacgaggcttcaaagttcttcaatgaggaatatttttcctaaattgcgttggaaaaaaatgacatagtcttaatgatcatttaattttaaaaaattaataacaaagatatacatacatatatatatatatatatatatatatatatatatatatattatatttattcaaatcttagccaaaattatcaaattactcaaattctttacaaaaaaaaatagttattatcaattacacaagaaggacaatatccatatacattatcatggtgacatattttagtgtcgtagttaatattgcgatacctcgataccctttttactctgtcaaccaattcataccaaacatatctcaatcatccattacaacacaatccaatagcaacatagtcgatccatgtcgttcaatttcattggcctagtttcagtataatttattataaatcaaagcaaatttttggacttgcttggtcatccattacaaacataatccaacaacatacatagttgatccatgtggttcaattttattggtctagttccaacataatttattatataaatcaagcaacttcttgggcatgcttcatatatctccctttttgtttatctctttgtcatcgaaactctttcaccccctcatatcgccccaattcaccaatggcaagtgctacaaaaaagggtatctcatgaagcaacaaagtcgatcgacaatgccctggtggtagtatcgctcgatacctcaagactaacaagtatgttaagtgtgtcgattctgacactccatgtacatcgcttctattgttgaatatcttgttgtcaaggtaattgtccttaactaccttcaatttcttcttttttttgtgtgtgtttgtggccactggatctagggtttcgaaattagggcttattttacctaatttttgttaataattttgttttaatgataaactttgaataattgaaatgatgaatttactttaatcgatattaattatttttggaagttttattttacacttggtatgttcaagttctagagttggctagaaatgctaagatggccaagaagactcaaattatgtgtaactgtattttaaacatcgactattaatttgttaacgttgaccaatataattttattttttcaattgttgaattaataatatggcttaatatatatttaacgaaaataaaaatataaaattgccttccaccatcactattctttctttcaattcaacttccaaatcttcaattgaatccgagaaagatatgaaacataataccaaacatcattatccttgtcatgtagtacaagcggcactttagcaccacatacactccattccgttaataactcccacaaatcacctagaataaagtaaggttgaaactccgcattacacgtcttaagttctctcgtcgtcctctacaatatcaaaaaaactttcacacttaagagtttcaaacacaaagagaacttattaaatgtgaattttttttttagattttgcataggactaccagaggacttaaagggtgcaaagaagagtttcaaccttattttgtgtttgagtgatttatgggagtagttggagacaaagaatgcatatgaggatgaagtatcacttgtactacatgataaggataatgttgtttaatattatgttttgtattcttctgagatacagattaaagatttggaagtcaaggtgagagaaggagtggtggtgcaaattgggattttaggaagtggaaaatgatttttttattaaacatatatattaaatcatactattatttattcaaaatttataaaataaaaactaaaattaggatattagttaacaaactaaaagaaaaaatatttattatataaatcatgtgaaggcataaaaaaattatgaggaatgcaatttttcatctctcgtaaaaatatttatacttctagttctttaactaataccttcatacaactgtttaacattttaccttttaaaatttgaatagagaaattgccattttaaaaattggaaaattaaatatatttattttaaaatttgaaaattgcatactgtaaaaacgtgtgtatataagacgaggggaatttttaatagtacatcacgtaattaacagtatctcactatctccttttaatccaatcaatacatgatcggagccgtccgtaatcaccgaaatccaacggcaatcaccatcgatccgcgtcgtttactctcattggtcgaattgccacgcatcacactatataatcctcgcaaccgcaaaaagtcttcaagtatataacttcttctaggtgtccggaaatcgttcctatcatcacttctcaaatctcgaaccctctcgttcgtgccgatcactaggtcacacttcatcaatggcgggtagaggcaaaaccctaggatccagcgccgctaagaaggccacctcaaggagcagcaaagccggcctccaattccccgtcggtcgtatcgccaggttcctcaaggccggaaagtacgccgagcgcgtcggcgccggagcccccgtctacctcgccgccgttctcgaatatctcgctgctgaggtaattgcagcaatttcctgtcgattttcactttgtttttttaaattatccttccctgtaattagatctagggttttgagattcaagtatctgtttttgagtaattgaatgatcggaacattgttttaggttttggaattggctggaaacgctgcgagagataacaagaagactcgaattgttccacgccacatccaattggcggtgaggaacgacgaagagttgagcaagcttctaggagatgttaccattgctaacggcggtgttatgcctaacattcacaaccttcttcttcccaagaaggctgggggctcatccaagggtgctgctgctgacgatgactcttaaatagggattcactgttcacaaagttcttgaatttagattctatgtttgctctcttttttttttcctttttatttgtagttatgataattgtgccctttgtagtagtagttaggttttcagtcagatgtgtttaaagaatgctcttacgcatcaagaaaggttgttcaaaatttaaattattttaatgtcacctttgagtcttgatctagcatttgatttctaattgcattctatcaaactttaatttaaactgtttgattaggctttgagagattttgtggtgtggtttttattttgcatgagcattgttggtggcttgaattttagtttcggctccgaatgaaactctgaaatgtgggattgataatgtttgaattttttgaaatgttacataattggaaatgcaactaattggtttttgaatttggacaattatgtacaaaagtttttaaatctgaacaattagtttctgaaatgttacagtaatgcttgtattggtgtttcaaagacaaaaaacacaaaggagggtgttattgggggtatatttatgtttttttttttttaaatattgattggtaatgtcggaggatgaacatgcttttgttgtttttttttatggtccatgttaaacagttcgaggttttaactggtgttggagatggtgcataacgggatatggctgtttcaaaaaagaaagtataaggtgggcttttgtggtgttatgtttttggttttttaaatgttcgattggtgatgtagaaacacaaagttggtttttgtttttgaaatgttacataagttcagtttttttatcagaacaattgattttggaaataacaaacagaacatttggttatggagatgatgcatacttactagttgtcgcgtttcagaaaccaaaatataacgagtaacgacgagggtgtgatttgggattgagaagttatgttttggttttcgaagtgtttaactggggactcgaatatggctagtgaaaggattgtctaaatcttgtggctggaaaggaaaggattttgtaaacttgtggcggaaatggaaaggattgtctaaatcttgtggctggaaaggaaaggattttgtaaccttgtggcggaaatgaaaaggattgtctaactatgtagcgggaaactttggtgctttgtaattacttttttaaatagaagctgatatcctttttacgatttaaagttgtttattgaagaaaggataatgggaaacgtatatgtgctctctgatacaggcaatattttgtttatggaagaaagaggattggaaaacgtatgtgtcctctgataatggctttgttctcaagcctgtcacaaataagacaccagaaatcctctagcatcagatatattccccaaccgagagtacataaaccctaagcaatttagttgttctcaaacctaggcctgtaatgtgccatggctggtaagagtaaaaattcaacgatgctgatttaagcataaaagggcggatgttcaattaaatattggtttaattattcatttaattcttatagttttcaaatttattcattttagtccttatagttaataagtgtttttttttagttcttgtcgcttatcttttaattctgaataggtccctactgttaaaattgttttataacgttaacttattgttgtcagaaccgcaccttgcaccgtcggcgacccttggcctcttcactcccttccacttctcctccatcaacgaaaaaacctcgtgtgccgtcgtcgacggcggcctggtgataaacaatctggtagcagctgccatcatgcacgtcctccacaacaagcgcgattttctgtcagtgaacagtgtggaggatctcctcgtcctgtccatcgaaaacgaagctcaggcgaagagaatgaacaacatcggcgagtgctcgacgtcgacggtggttgacattgcgctcgaaggcgttttcaagaccgttgaccagatgctagaaaacgccttttgttggaaccatactatctatgtcaagatttaggtatgtcattaatcacactgtttgattctctagagaatgggggaaaaatatggaagctaaaagaaaatgaaattagattcagtaaattgcattggtctcagtgaagtgaacgctacttcttgctatgttttcgatggacagaatgaggagatttgccacgtcgttcaccgatgggaaatcacgtttgttgttgaggacgtgcgtgacggaagctgttgttgaattgttcatcaccaagctgccgtcgacggcggcgcactagattctttttgtcgacggaggagaagtggaagggagtgaagggaccaggggtcgtcgacagtgcgaggtgcggtcctggcaacaataatttaatgatgttaagcaattttaacggtagggaccatgatgcaatcctaccccgcaagagcattggatagaagactccaagtagattgaaccaaagatgcaagagaaggtcctaggattctcatgagcctttggacagatttcggacccatgggctaagtatgagcccacttatctttgtacatattagattaatgtttcattatttttgggtcttgtatttaggactccataatgtaggtagggtacccagaaatgtagaattttttagctcttgtattttagggtacctagactagtttttgtattaagggtagttttgtaatttcacatgcattaagtgaatatttgatgtgtgtgttggaaaataaatttaattgaattgggagaagcccaatccaattaaattttaaaggggggtgaacatttgcttgctacaccacattgtcatatcatataaccatactttgtgcatgtctttcatgctttacatgcctcatgccacctaagtacacttagtggagaatcttggactagtgggctgaaccataactaaaattctccaatcataattagtgaattagtgaaattttggcttcacaaattcaatttcaaatccaaatgaaatttgaatagaaattcaaatttttctccaattttgtgggacacttaggctataaataaagatcatgtgtgtgcattttttttcctttaatcatttgagaattatacttcaaagtttaaacctctttttatgcacaaattttgtgtttcttctctccttctccctcgattcttcttctcctacctccaagctcttatccatggcttcctatgatggtgagctttttcttgactcatcctctccttgaagtgacgtctcctctcaactctcctacctccttgaagtggtgtctcctgccattaaaattcaagaagcaaaggatcccattgatgaagaagatccaaggcctacaaagttcacatgaaagtacattagcacttattgaaaattaaaaagtaaactacacgaactaaaaaaatcacttattaactataaggactaaaatagataagtttagaaactatagagagtaaatgggtaacttaaatatttgatgtgctatcattctaaagcgttggaaggtctcatccactctgcatgaaagatcgtttattttgtggatggtgttcaattaaatatttcatgtgctatcatttcttactgtttaatgaatcatgtatgaatttttgaatcttcaaaagaattgatgcatgatctacgactgcaacatggtgacattggtttgtcaaaaaattaaggcaagaagaatctagtattttttattttttttggtggtgagttaacaaggtctgaataaatcgatgtaattgattagcataagtaataacgcaagtcaacactatacttaccgaagaaaagataacaaaattaactttaagaatttcactcaaaccacgtcattttaaatgaaaaatattttaaaaataatattattaaataagaataaaattaattaaatttatttatatttaagtttatatatatatatatatgaaactttgatccgtgaaacatcaaatggccggcgaggtgacaacttatttgaatctttggttcctaatcagcaatattcaaagtcatccccattttttaatcattttctttccttttgtctttcttttctaaccaatgatacccattatttatgaagcatatatgagcaaagcacaaaaagaaaacgcaacaagagcaaagatgaaggcggaagaaacaactgatacccacgtggccatcttcccctgtccagcgcagggccatgtcagcaccatgttgaagcttgcacagcttctcgctctccatggcttccacatcaccttcctcaacacagacttcatccaccaccgcctccaccgtttcggcgatctggaagctcttttacaaacctacccctctctccaattcaagaccttccccgatggcctccctcaccaccaccctcgttccggacaaagcgcagtggacctctttcaatacataaatttgcacgcaaaacctcacatcagacacattcttctctcccaagaccccggaaagcccaagatcaattgcttcatagccgatggagtcttcggagccctcaccatagacgtagcacaccaggttggaatacccatcattcattttcgcaccatcagcgcttcctgcttctggacttacttctgcgttccaaacctctttcagtctaaccaacttccaatcacaggtacataaacatagatattaactctttctggttttagctttagcatactttgtttcaacattttgtactatgagaattcagaaatagctttgataaatatcgattgtgtttgaaaggggatgaagacatggatcgcgtgataacatgtatcccagggatggaaaacatgttccgctgtcgagacctcccgagtttcagtcgggggactggatccgaaatagtatatgctttgaattctttggccttggagacacgtgagtcgcttcaagcacgtgcactcatactcaacacgttcgaggatctagaaggttccgtgttgtcacagatgcgtctgcagtttccccgtgttttcaccatcggtcctctccacgcacacttgaacaccagaaaagagtccaacaccgaaacgacgccgtccacaagttgtgtcggtgaagtggatcggaggtgcatgacgtggcttgattctcagccgttgaaatcggtgatatacgtgagcttcggtagcattgccaccatgacaagggagaagctaattgagatatggtacggtttggtgaatagcaagaagcggttcctttgggtggttcgtcctgacatggtggggccaaaagaaaatggtgaccgggtaccggctgagctggaggaagggactaaagagagagggttcattgtggggtgggccccacaagaggaggtgctggcccacaaggccattggtgggttcttgacccacagtggatggaactcaactttggagagtctggcggctggtgttcctatgatttgctgccctagctttggagatcagcatgttaacagcaggtttgtgagtgaagtttgtaaggttgggttggatatgaaggatgttgcatgtgataggaaccttgtagagaacatggtcaatgatctcatggatcacaggaatgaggtgtttctgaattctgctcgggaagtggctttgttggctaaccgtagtgtgagttccgggggttcttcttattccaatttggacggcttgatccagtacataagatccattagtcaagaaattatttgatacttgaaaataatgcacaattgcatgctcaggtttattcttgcaaccgtggccacatgcaattaggagtatgtaaggagcgggtagagtaaagaataataaaaggactaaagaacagaatcgtatctatttggattcttctataatcagtcttaatgtgcatttatacttggtttaattagtcttgcagcttgcaaagtgttgcccacatcatctttggaattccttttagtcatgtgtaagtttccttatgtaactattttggtttggaacaacatttgcctttatttaattatggtagttcaatatttacatgagtatatggtattctacagaacacagattgtggtatattaattagggtgcacaaacgacattaattatgagaagctgcaaaatctataaaatctggtatggtgttggaactaatatatatcatttatcatatttaaatatttataatttaaattagtattagtatgggaaggagaatggtggcaacaatgctaccacgtacgtaagtactctagaggaacaagaatataatctcaggttcagatgaattggaaaatattgaaatgaagaaattgtcttcgagatcttgttattgttattaagatctaggttagtgtatttgatttaaagttttagttcaagtcataactatatactaatattatttaaaactaataagagaaggctacatctatatttaaaaatcaatgggcatgcatttctttcgcacttgcaaaaatgttccttgatggttgtagctgcggtcaaagtagaggaggcattagcaatgtagcattctaggaggtggccaggtttgcaaattacgatgtggtaacacatgatctccttccgccagtacaagaattgagctcatgcatgcttgacaatgattaagtctccgagttcaacaaagacaagaaatggtggggtttatgacatacatgtgaagctctacaccatatcccatcacttaaagcccaaggtcaaatgttacctcaagattccctcaagtaaaatgtgctgtccatttctaagttcatttcgttggatacattttctttagctacccattatgctatattttgataattaatattgtgtgtcttttgtcattattttaatcattctttgtctctaattaataagcaataaatttgtttgtggtactcctctgcatctagaattgtccttaatttgtttagtgtacgtactttacaaatctgatatgtttttcatgtagtatttcaagatttcttagaacttatgaatgtagtcttttgtagtagtatattaaaaaatagcgttgctttcgttcctatctagggcattgtttgtttgtcgtgttaatttggtataaaaatctaaaagagattgtaccacacgaaagcaagagcatatgtcatgtggtgttgaatcaaccaggaatagaaagtatcggttgtcggcattcggcaacgttatattaatgtatggccgtaatatatgaaaggcaatgttaattagagttgcagtgttggaaactagggttggatacgatttattacacgaaggatgtgtgtcacagccatgcatcgattggccgtaatatatatatgcatgctcccagtttataaagtcgtaattaattttatgatttttgtataagaatttataactttggtttacaaaatcatatttatttttacaatttatctcgaagataattattcaaaaagtgttcctatttagtaattttttttaaaaattatccccaaatgataaaaaaaaacccaggaacgttgtggacaatatggtcgatgatctcatcactgcgttgaacaagtctacagagtgtgagtgcaggtggttcctcttatgtcagcatggatcatttgattcagtacataaatattaaatactgtatcaactagccaagaaaataagacaattgcttattgcacctttttaaccttttgaaaatcctaattcataatgtaatttacattacggattagcctttctagaatataatctggaatgtaaacttttacattttggaatggctaatccgggatgtaaattacatttcggattagggtgcagtgcaggaaacaagtccggagtagggtacaggaagcaaggtcgaaggtgcagaaagcaattgtcagaaaataattgattatggcccagtccaagtcattgctatatgcggcccaaattgaatttggagttatgggttttgtcaactaggtgtctttatatttcttccttcagtttgggtcctgagtcctgcctgttgtttctcctcaaagcagtaataatgaattttgattatagttttttagttcttgacatgagaggaacaaagagaaacttgagctcaaattgaactataaataaagaggattgtaacggaagaagctttgcttctcgttaaatatgtcataatgaagttatgggatcttgcttgaaacttacataggttgcgttttgttacgtattacgatataggacaaatatttgagttatcattatttgattaataataaataacacacttaaaataatataaaatttactaaaataaaatacgaaatatatataagttaaactagtcgataatataaattcaaaatatatgatatgataaggttgttgtagctaatagacaatatgaatttaaaatagtaagataaaattgatatattcagtgaataatgtaaattcaaaacaaatgacatgataaaatttttgttgataggaaataatacttgaaaaacaagaaaaatgtaagaatatgtatgtcttttaaatactttgtatttgagatgaaaaattattttatgaattttttagtaacaaannnnnnnnnnnnnnnnnnnnnnnnnnnnnnnnnnnnnnnnnnnnnnnnnnnnnnnnnnnnnnnnnnnnnnnnnnnnnnnnnnnnnnnnnnnnnnnnnnnnctgtgtaatattttttttacaaatataatataattttcttaatttagaaattgaaaatttgtcatttgaactggaaattttggaaattaaaaaaaataaagtaatatgtgtcattctttaatgaaatgtacagtaagaaattaagccggtttaaaaataatatattcatataattggatttaaatacaatacattagatgagataaacaactgagataagcaatgcattatataagtgcattagaaaagaacacttttctaagttacatataagtggatttttttttctttgttatctagcttggacgactattagtagataaaaaaaaaatccacctgccaagtcccctgctatcttaactaccattctgaatgtaaaaataaattatattttaacataaattttattattatattcataaaataaaagagcggcgtaggaaaaaaaaaagagaaagaatgtatgatcgataagatggttaatgtaatgaaaattaattaaaaatgttatataaccattttttaataaagacaacaaattttgaatctaatacaataaaatattatataattttaatgttaagttcattaggagacaagtcaatgtgatggctcatgccttgggtaaggcttccatgttatttacagatattcctacttgtattgctggtttaattgttaatgatatgagttgaggttgcttttgtcaacaaaaaaaaaaaaagtattaataacataactctaacatgaggttaaccaactttccgaaagttcgcgcacatataggtatatatgtcaatgatattactaccagtgcaatatttcaagcagaggaacaagtttttaatttattctagctaggtttggggatacagtttctattctacaatttctataatatatgtgaatgccaaactcacaagatctccaaacgaatccatttcaatcctttagagaagaagttgcataaccaacccacataggtatcatcactttagtatattttctcactatctcagtcgtatctgtgtccttatatcccttttagttggtgccccaccttggaattttgattaacaaaaccggtcaaaactactcagtgtgcacataatctaattggagagaagcatcggatattttcgttggttcagtttgaagttgcacctttgtttaaccctttagtataataatattaagggtccccacaaatcgttattatatgcttcttatcgactcatgcactttaagacgtcaatggaattcagttaagcccacttccctaactgaagtgacatgggtggcttggtgaagttggtggtggtggacttttaaattggacaaataataatattcatatgattaacaaaattatacgttagttttttctttcttgtttatttttcttcattacatcattcatctattttatatatgtattttctctttttattttcttttatttgtataaattatgatatatatatatatatatatatatatatttattaatgtatgaatataattttaatctttatattaaagtctttgatatgtaattgtattaaatattagaagaaatttttttatcgtttatgtaattctctttattagacttaaataaagttgtctcccgtgaaaaatatgtctgatttttttttaaaaaaaactttgtgaattatcaatataaaaaaaaacacattaacggtttagttcaccaacttaacaaagaattctgccctaagctctttcttgcgtgatagtgaccctatgaggagggaagatatctaatatcttaatacttaccttgtgttttagggataaacatactgaaggtgacataacacagaagtggatatgatgtctcattgttacacaggaaagttagtgaaactctttaatctatttcagtgctggttttggtattgaactttcctttgttttttggcgcgggatttgtgggtgcaattcaaggatcggggccatagttccaaccagacaaagacaaaattgctgtaaacttttaaaaaaagtttatataaaacaaacatgtcactgcggtacgaactaaaaacaaagaaagagatctttggacggtttttctttcttaacaatatccttttagacacttattttgacgaacaaaactaattcgcaggcacttacgggcatgccaatctactttattatggagtcaagaaaaatacttattaaattatattaaacacataatttattctttatacatgttgtaaattctcatgtaaatacttattaaattagtctctgtacatgtaacaatatattattagatagtaatataaacaacaaattaattgcattcaaatcaaaaaatttacactaacctatgtaatatcacaatatattattagatagtttaggagatattaactccttaaataatctcagtatctcaaaaaattaatcattaattttttgttaaaggatacttggtttaaaaaaattaattaattctaattagattctttgcactaacctgatctagcatatctgggctcctttttgtttttttttctttttcttgaaatgattatgtacgtagttgagcactgcaatcatgaatgcgttgcacggttgcagtaacattatgtaaattgtaaagtaagttgtgaaattaatatcctagtctttatctttagccaggatgacacaaaaccttcacatggtataaaatcaagtgattgttgttttttattttattcatggcttaatgtgattttttatttattatgtttaacagttacttcttttaatatattaaattttaaaaaatttattttaattttttatgtttttgaaatatattattttgatcaatttttcgttacaaacattagtattctgttaatttttaaattttaaaatgatttgatattacttttgattcattatattttataattgttttattttggtacattatatttcataattgttccgctttggtatattagtcttttaaatttttcgaaacatatgttttagtcattttttcaattttcctttagaattgttaatgttcgtcattgttttaaattttaaaatagttaaattaatatagtaccgactaaaaatcatcgctatcttttttatttaaaaaattaaaaatcattaagtaaatgaagatggatttgaaatcacgaacaacaatagcatttactcttatattattattattattttatttaatcatttaataacgataatagtttcattcattaattattctcaatcacaatggataagagttcatcctctttccgccgcttcgcctcttcattgcaacctccctacgcgatcaaaattataacctcacatagctataacaaccgtctcattgtcgccactggcagcagcgcattgtagaagacaaagaagatcgacatcacccagttgaggatgaagtttgattgggcaaaccnnnnnnnnnnnnnnnnnnnnnnnnnnnnnnnnnnnnnnnnnnnnnnnnnnnnnnnnnnnnnnnnnnnnnnnnnnnnnnnnnnnnnnnnnnnnnnnnnnnnaatctaagttgtcccataatttttttcacatcaaatgtgaaacaaaaatatttatcattactaataccataaattttaacaaaacaaatgaactcatcatgtcaatgaatttgctttccctcctccttcattgattgatatcacttaaaaaggaaagtaaggaaacaaattgtagaacccactttatattttcaaatcttttcaaattaaaagattaaactactcttgtttttacatactctactttctttaattataaatgcctgtgtaattttgcacacacacacacatatatatatatatatatatatatatatatatatatatatatatatatatatatatatatatatatatatatatatatatatatatatatatatatatatatatatatatatatatatatatatatatatatcattgagaaatacccacgtcctatatcggctatctcatttcttggagtgcatcttatatatctgttgggacaattttacttaatgtcaattggttttaagatgaaatctaacatggtagtcagactttcttcctgaaacctcgctttcgctttcgttgcgacaacccattatttgttgtttacgcatcaattggttttaagatgaaatctcactttatataatcctttttcctttcacattttctgaaaaataaaatagcaagcttaattagataataaagagaaatgtcttaattgtcttaatatgtgttattgctctttaaggaaaaaagaataccacgaatccagaaggctcaagtaaataatgatataaacgtatttgatcatttgatcgtgtttcttaatgttaaaccaatactcattgaccctgaataaataaaaataaaaatactcattgacttcatatgtttgatttatcaattgcattgtcattatttcctcccattaatttgaattactttttacgttttctatcggacttctttttcttatagataagttatctactaaataattattttttatatatataattaagatatcttgcaaaggtgatgaaaatgatagcagcgacaggcaacggagtcctggtatcgnnnnnnnnnnnnnnnnnnnnnnnnnnnnnnnnnnnnnnnnnnnnnnnnnnnnnnnnnnnnnnnnnnnnnnnnnnnnnnnnnnnnnnnnnnnnnnnnnnnnnnnnnnnnnnnnnnnnnnnnnnnnnnnnnnnnnnnnnnnnnnnnnnnnnnnnnnnnnnnnnnnnnnnnnnnnnnnnnnnnnnnnnnnnnnnnnnnnnnnnnnnnnnnnnnnnnnnnnnnnnnnnnnnnnnnnnnnnnnnnnnnnnnnnnnnnnnnnnnnnnnnnnnnnnnnnnnnnnnnnnnnnnnnnnnnnnnnnnnnnnnnnnnnnnnnnnnnnnnnnnnnnnnnnnnnnnnnnnnnnnnnnnnnnnnnnnnnnnnnnnnnnnnnnnnnnnnnnnnnnnnnnnnnnnnnnnnnnnnnnnnnnnnnnnnnnnnnnnnnnnnnnnnnnnnnnnnnnnnnnnnnnnnnnnnnnnnnnnnnnnnnnnnnnnnnnnnnnnnnnnnnnnnnnnnnnnnnnnnnnnnnnnnnnnnnnnnnnnnnnnnnnnnnnnnnnnnnnnnnnnnnnnnnnnnnnnnnnnnnnnnnnnnnnnnnnnnnnnnnnnnnnnnnnnnnnnnnnnnnnnnnnnnnnnnnnnnnnnnnnnnnnnnnnnnnnnnnnnnnnnnnnnnnnnnnnnnnnnnnnnnnnnnnnnnnnnnnnnnnnnnnnnnnnnnnnnnnnnnnnnnnnnnnnnnnnnnnnnnnnnnnnnnnnnnnnnnnnnnnnnnnnnnnnnnnnnnnnnnnnnnnnnnnnnnnnnnnnnnnnnnnnnnnnnnnnnnnnnnnnnnnnnnnnnnnnnnnnnnnnnnnnnnnnnnnnnnnnnnnnnnnnnnnnnnnnnnnnnnnnnnnnnnnnnnnnnnnnnnnnnnnnnnnnnnnnnnnnnnnnnnnnnnnnnnnnnnnnnnnnnnnnnnnnnnnnnnnnnnnnnnnnnnnnnnnnnnnnnnnnnnnnnnnnnnnnnnnnnnnnnnnnnnnnnnnnnnnnnnnnnnnnnnnnnnnnnnnnnnnnnnnnnnnnnnnnnnnnnnnnnnnnnnnnnnnnnnnnnnnnnnnnnnnnnnnnnnnnnnnnnnnnnnnnnnnnnnnnnnnnnnnnnnnnnnnnnnnnnnnnnnnnnnnnnnnnnnnnnnnnnnnnnnnnnnnnnnnnnnnnnnnnnnnnnnnnnnnnnnnnnnnnnnnnnnnnnnnnnnnnnnnnnnnnnnnnnnnnnnnnnnnnnnnnnnnnnnnnnnnnnnnnnnnnnnnnnnnnnnnnnnnnnnnnnnnnnnnnnnnnnnnnnnnnnnnnnnnnnnnnnnnnnnnnnnnnnnnnnnnnnnnnnnnnnnnnnnnnnnnnnnnnnnnnnnnnnnnnnnnnnnnnnnnnnnnnnnnnnnnnnnnnnnnnnnnnnnnnnnnnnnnnnnnnnnnnnnnnnnnnnnnnnnnnnnnnnnnnnnnnnnnnnnnnnnnnnnnnnnnnnnnnnnnnnnnnnnnnnnnnnnnnnnnnnnnnnnnnnnnnnnnnnnnnnnnnnnnnnnnnnnnnnnnnnnnnnnnnnnnnnnnnnnnnnnnnnnnnnnnnnnnnnnnnnnnnnnnnnnnnnnnnnnnnnnnnnnnnnnnnnnnnnnnnnnnnnnnnnnnnnnnnnnnnnnnnnnnnnnnnnnnnnnnnnnnnnnnnnnnnnnnnnnnnnnnnnnnnnnnnnnnnnnnnnnnnnnnnnnnnnnnnnnnnnnnnnnnnnnnnnnnnnnnnnnnnnnnnnnnnnnnnnnnnnnnnnnnnnnnnnnnnnnnnnnnnnnnnnnnnnnnnnnnnnnnnnnnnnnnnnnnnnnnnnnnnnnnnnnnnnnnnnnnnnnnnnnnnnnnnnnnnnnnnnnnnnnnnnnnnnnnnnnnnnnnnnnnnnnnnnnnnnnnnnnnnnnnnnnnnnnnnnnnnnnnnnnnnnnnnnnnnnnnnnnnnnnnnnnnnnnnnnnnnnnnnnnnnnnnnnnnnnnnnnnnnnnnnnnnnnnnnnnnnnnnnnnnnnnnnnnnnnnnnnnnnnnnnnnnnnnnnnnnnnnnnnnnnnnnnnnnnnnnnnnnnnnnnnnnnnnnnnnnnnnnnnnnnnnnnnnnnnnnnnnnnnnnnnnnnnnnnnnnnnnnnnnnnnnnnnnnnnnnnnnnnnnnnnnnnnnnnnnnnnnnnnnnnnnnnnnnnnnnnnnnnnnnnnnnnnnnnnnnnnnnnnnnnnnnnnnnnnnnnnnnnnnnnnnnnnnnnnnnnnnnnnnnnnnnnnnnnnnnnnnnnnnnnnnnnnnnnnnnnnnnnnnnnnnnnnnnnnnnnnnnnnnnnnnnnnnnnnnnnnnnnnnnnnnnnnnnnnnnnnnnnnnnnnnnnnnnnnnnnnnnnnnnnnnnnnnnnnnnnnnnnnnnnnnnnnnnnnnnnnnnnnnnnnnnnnnnnnnnnnnnnnnnnnnnnnnnnnnnnnnnnnnnnnnnnnnnnnnnnnnnnnnnnnnnnnnnnnnnnnnnnnnnnnnnnnnnnnnnnnnnnnnnnnnnnnnnnnnnnnnnnnnnnnnnnnnnnnnnnnnnttagcgaagttaatatcaggttttatctttcgtcaaaagtaactttgctctggtctttccggtttcggtcttcaatatcatagtcgtataaaagattttggtttttcggtgaggagtataagaattttttgtagttccaaggagattatgtcttgacgtcgtttgagctatgtcgtattgcattttttaccttttaagatctaaaaaaattggaggagatgatatttttttagttatttatttagaaggcttaatgtcacttttggttcattatgttttgtaattatttcactttaatacattaaattttaaaagtttcattatgattctttatttttttcgaaatgtatcatttttatcattttaaaaattttaaaagttaacctaacactaaggtttttaatgaaaaattgaaaaaggatcaaaacatacatttaaaaaacataaagaaccaaaataaaatttttaaaacttaatataaaaaaataaaatcactattaaacacaatgaacctaaggtcatgttaatcctttattcattattattttggtccctttctctttggttgttgacgtctaagggcttttgcagtcaacagaataaaccctgatgtgttctacttcgatcctcttttttttggaattccatttaaattatactcgcatattccatgtcgtattattatcttctgaaaattatcgacggatgctcgactatgtgaacattttgtttgtgttataccactaacttcaaaattaacaaaactcatctaatttttataacaaaaaattatgcattaatttaattatattcaaaaagcatttccaaaaattcaaacattttagtacatgcagttcattttaagtcattttaatggtgacaacaacgaaaatagggttaattaataagttttgacattaataaaatgtcaaagttcaagtgagctagatgcatcatgtaccttctctaatgtaaaaatatatatatgaaacacatggaggtccgttcaccagtctatttccaatgatgccgctcggcaacagtataagcacaaaggtaacaaactcaaccactagggtcctacatgaactgcttaataaatattcttatggttacttttattgttaactgctacttcagtttgccatatgatgttataaatattattctatacaattttattttattttgagaaatgctatatccgcccaataaaactttgacagttgtctataaattttattgtaaaatattattttcttttaccaattaaaatttgatatctttccaatgctgtcccttgctatacgacaacacccctttcccacaagcagggaacgaggtagatgtctagacgaaggcaatgcgtgatgctccaatgagattgcaactgaaattcagaaacaattaagggattttcttgcaagcatgagcattcagcttttctgtctcttgtgactgagagtgacagttctactggtgttgtctgtgggtaataataatctaggtgggtgctgcaattgcgtttttgaaaattgcagtgttgcttgtaggatttggataattgggtttattttaggtccttagtttttcaatggaaggcctatctggttttgttcaaggcttcctagcaaccaaatgggtggaagtatgctattgtgataagtgggaggtggcataaagttttgagtaaaaccaaaggagcattggtagaagatttagctgttgccattgatgattttattgatttactagtcggggagaattggaaatttgggtattgatggctttaaatctttatcttagtggcaatggcttataaaataaattcttgttactttggaaatcttttcagactaacaacacttgacttgggaaacatattctcatgaaatttcatcattgttactaaataaataaaattgaaccaacttgcccaaaacaatatttgaatcattttatacaaatgtattcataaattgacatatatatagaattcaattgcatcaataataataatataatcagttttatgaagaagaagaaatcaatcctagtcactgccatcacaacacttaccaaataaacagtataagtaacaataaccatgatcaaaatcataaaccgagacactagcaagcacaccaccaccaatattaattggtagaagaaataccttaaattacgtttagatagagaattttaactgagtaaagtaatttatcagaaaatttaaatttttttaatctaaaattcatcgttttgatgtttttttatgaagaatttaaatttttgaaattttaaaacagaattttaaacaactaaaaatgtgaaattttaatttttttttttaaaatgtgagaaattaaaattcttttgttaatagaagaaccttccaaaacgttcctgtatttttttttgtaatcttcatcctctctcccacctgaaaatttccaaaatctcgttctcgaattcgcgactcttccctcatgctcgcagaatgttgatcgggtgcagatatggagacacttagaattgcacccgccagtcaagggagcagtcatcactgcctatcacgcggtggaggtactcgtcggcacgaagggcctaagtcatgctttgcgtcgttgactaaatgctactatggtgggggagaattggaaatttgggtattgatggctttaaatctttatcttagtggcaatggcttataaaataaattcttgttacttaggaaatcttttctgactaacaacacttgacttgggaaacatattctcatgaaatttcatcattgttactaaataaataaaattgaaccaacttgcccaaaacaatatttgaatcattttatacaaatgtattcataaattgacttacatatagaattcaattgcataaataataataatataatcagttttatgaagaagaagaaatcaatcctagccactgccagtataagtaacaataaccatgatcaaaatcataaaccgagacactagcaagcacaccaccaccaatattaattggcaagaaataccttaaattatgtttagatagagaattttaactgaataaagtaatttgttaaaaatttaaatttttttaatctaaaatttattattttgatgttttttatgaagaatttaaatttttgaaattttaaaacataattttaaataactaaaaatgtgaaattttaattttttttctaaaatatgagaaattaaaattcttttgttaatagttccaaaacgttcctgtttttttttttgtaatcttcatcctctctcccacctgaaaatttccaaaatctcgttctcgaacttgcgactcttccctcatgcacgcggaatgttgatcgggtgcagacatatggagacacatagaattgcacccggcagtcaagggagcagtcgtcactgcctatcacgcagtgaaggtactcgccggcacaaaggacctaggtcatgctttgcgtcgttgactaaatgctactatggtcaggtatgatggtatacgctgtcatgtcctgattttcctgcgattccccatgtcgtatcaatattattctctttggaagcacatcaaacatatcttatcttctctttgcattcattttctttcatcctcacaattttaatttttttatttaaatacaaaattttaaaaataaaaaaaattcaattaaagtatttaaaattattagaatttaaaatttcttccctcatccagaaacactcttgataaataacatacggagcattataaatcatcctctgtacccctacaaaatcccctttgggattaatttcccagaacccatatatcttctatgaaacccgtaaatgaactgttgagataccaagccatagataacacttgtttcacattgttgacgagaacttgcaagtaaaaaataagtgtatggcattttcctattcctgttgacaaaaagaacaaagattggcagattttgtgtgcaaagattcctctttcaaagattgtccacagttgtcaatcgatccagagaaagtctctaaataaagatcatcacattacttggcacgtgttgtttccacaagagctcatagaaaagtgaatcaacaagatcataacatgcacattttttttagtcacttactctttagttccttaacatatcctcacacgcaaataatggtaattaaataatgacaaataactccaaaaattgatgttacaggtattattttaaaaaaataattaaaatgactaaaataaaaaaaaagataggcatatttacaaagatcaaaaacttatttagaatattattcttatatatatgttagcaacacaattaatcaataatgcactcttcactgccttaaaaaaaaaattactcactctctactattggtaaaaattattggggactacaaaattacaagtgaggctcgataaataagaagttacaacagcaaaattttatagtttttaattaattttaaataatagtagagattgtattaaaaagaatgtgtttctataatatttctaattttaaaattttccacaaatttaccaaataaatatggtctagtggtaaattgcactgattcactagtttaaccataaaactagttgggccatattgagttacactaatttactagcatatccaacttataaataagtgactccaacaatttatttaactgattctcaatctaattaacttgtttcatataaaaagtaagagagttaatattagatctactactaccttatggcaatgtctgtttaattattactgataatcttgtctcacaaggaaagataaaacattttaaaaaaatggagaactaaattattcaattttcttgtcgtcataattaatacgctttgtgaatttttagtgattcaaaatttaacatgtcttctgctttttaatatatttaatttttatatagataataattaaatctactagttgttgaataataaatatatttattatatattgaaaaccatgcagatcgacttatccattaatcaattaacatacctttgagacatatgtttatttataaaaggacgtttttttggggtcaaagtataaaaagggcatatgcttattgatgaagaattgatattttgattaaaaaagtcttctgagcataaatacgtaaaaaaataaacatcttaaaaattttgattaaaaaattattgtaaattacaatatatcaatatatatatatatatatatatatatatatatatatatatatatatatatatatatatataaatcatgataaaaataaatgaatattttaataaatatatttttagcctttatccagtaattaggggaagaatgtgtttattcgacaaaaggaagtaatgctccgttgaaaaaacatacctacctgcgaatttttatttattttttatatattttagtgatggtttaaccgtcaatacataccatcctcaccgatctaaatatttattctgtatcctttgactcccatcaaaagtctcttttatcttcatttttaatttattgaatgattcgaatattttgtgtacctgattaaatattttacctaatgaaaacaattgccacactttctaatattaaattattcttttgtattttccttaattttgctttctaaactaacaggcaattaataagttcgctattgtttttagtactaaattttatgtttgagtgcacatgagtggtgagaagaaagtcatattgctatttattagacgtgtaatataaaaacaatttatttatctgtatttatgaatttaatttttaggatggttagtttgtaatatgatattagagtctcaatggccaagtaatttaaagtttgattctcactatccaattattgtaataaaaattaaatttcagtgcaaaatatattaatttagaataaatatatgttacaaatataaaaaaacataaaatcacaggttatcgttttctcaaatagcgtaattgataagaccacaaaaaaaatgataaggtgttggattcataagtgtgactaatgtgattaattataaaagtatcatgtttggtagaagtgaacaaattaaacaacatataaataaacatttaatgttttagtattttggattaaataaagtgacatgtttatttgtgggccactataagatattttcttaaggaaaaatgggaattcacacacacaaaattattacatgttcattataaagtgagttttaatctcatgaaaattgtatgaaatattaattcacaaaattaatattataattagaacttaatatttagggggtctaactagttcaggtaattaaatagaaggtgtgaattacgataaatcttagtgttcttgattctacgagtaaaaatatatatattaaatgttcattatattataattattataatgagaataaagtagaatgccaataacaatagttaatttaagactaaaaaaagttaggatgattaactgagtctaacgtaaattcataattgatgatcccataaaaacaagaataaaattaaatacttaaataaaagagaaatacttaaattaagatgtaaaaatttagtgtctaaatgaatatcaatcaaaatttaaatacctctcaattaagtaaatattcaaatttgggtgtgtagatgttgagtatctaagtgttcattcttttcgtattaagctgatgtttttccattaaaattctgtcatttaatatttttcattcaatattttccctttttttcactttgtattttggatcatttcataattacaaattatccattaacaataattatcacaaaatttggtcgccaatcttcaataaaatatcttttcttaatcacatttttttatccaaaaatactaatatttctttttctactttctcaagtcacttctatgcacacaaattcaattaaaaagataaattaaacaataaatatatataagaaattaatataaattatataagagaattgtcaaggatactttctttttaaggttttttttatgattgattataatttttttgaaaatcattatttttataagttttacttttcattcctgatttattacaattgatatacaaaacctatcaaaattaattatttctaataaattttaatccagcatagaaagagtcttgagagaatgcaagaaagaaagagtgtcattaacattcatttaagatttctgcctagacaaaatctatttacaaatgtgaaattatcaattactagtatcagttagttttatatttttaaagaaaaaaacccaggctgaagtgcaacgagtgaagactaaaaaacaagttagtgcagctgttccatttgcagttgatattatgatgatttgatttggcctttatatggcgacgcaagttacggcaaaagtcacgaccaacaattccttcctcaataaaaccaaaaccattctttatttttattttagcgtccttattagtaatatttaaataacttattctaaaaaatgagatttttcaacttttcaaaagatttttccaaataattaagaaaacattttcaaacatgctataaatgcttatttcgatacatgttaagactttttcttttcaaaaaaagtactaatttgtatagtagcttgtctaatttagataaaacgttgacttttcaaaactaattttacactaacaaaatgaataataatttataaaagaggaattttttttttgaatttgtttaaataatattgactataaacataaaatatttagaaatatatttttttcatcgtctatataattgttttagaaattgtaatattccacatcaaatcgactgtattctaaatgagcaacacctacgttttgaattttggccaagttacgcaacaagtagtaatacttcatgcttaaaattcctttaatcccaataggatcatatttggcttcctaatacatcatcacacaaaagaaaaaaaatattaatcaaatttttagtaattaacattcaaccatcaccaagtctgtatattaattgatgtttgagtttgagttttggacaattatattaaatattgatagatttttttttaataataattctattaggttaatataagattatttagtaaggatttgttcatacacatattaagtttataaaaaaatatttaaatttaatttttacactatacattcttaaagaaggtgaagaactttaaatatattatactttggatcaatgattaaaatctcataatcgactcattaaaatttataaaaatatttgagatttcataaaaaaaagtcaaacattctaattatactagttaaaaatattactaatatagaattatctctcttaaaaatatactttacagctaaacattcaataaaaaaaaaaaattgtgcatgataacattaacatcaaataaaaagttaaaaataaggcacaagactaatccaattgaaaaggttgaaaacataacaaataaataaatgctgagaaaggaaaatagaagtgaaaacagtaggtgtataaatatagcaaacgttccaatccaaggctcaaactcaaagctggattttgcatgctcctgtctttccaagaataagcaccgctcaaacacataccatttttgaaaccccttcttctcagctttctcttctgcttccattctgcatccacctctttccctcttcctctgtattcctctgtctctcttaaaggccctcaccaaatctaaagaaggattttctcaccttcctcgctattaatccttcttttagtatttaggtgcgggcacgagttgtttgggtttggaataaacactcccaaccagaataccatgtcaatataaggtaaccttcttattttcatgttttttcttcttcttttaaataaccacctctttctcgggtgcagagaacataaaacggaaagttaagaaaaataaattaatttatcagaaaaggaaaccacgttggattttgtttatttatttgcaacaaatttttatctgtttacatggggaaaaatgaaagtttttatggtcttttgtttttcccctgttttctctgtaactcgcggtgttttgttgtttctgcagagtgtggagaagaggggaaaatagaagagaaggaaaacccagaaatggcaaccacggataatcacgtgaaagagtttacgatcgacgacgagtcatcgccgagggcgattctggaaacccctgtttcgggaacagagtccgacaacagtggaagcagcgaaagcttcagttccgtctcgccggagaagtcgccggcggtgaccggaaaagaggttcccaaggaaggttacgtgcaacagttgaagtccatgatcgacgttttcaagttcaagtctgtgagaaagttaacagccgttcctctgctttcggtgggccatgatatctctcggaaagggttcaccaaaaaacttgctcgtattcgaagtgctgaagatagtattgatattggagcttttcccacgaaaccctcttggaggaacttcgattatgaagagttagctgctgctactggtaattttagttatggtatgaaccaactccctctccctctctctctctctgttttatttatttatttatataatttggtgaagaatttgtcttttttaatagtagacacaagttttttttttctcctaagtttatatgcataaaaaaaacatttattgagaaagttcagcttattaaatagatctctaatagataggtgctttgagaaaataagaaattagttctcaacttacccgttaggattgccttgagttcgtccaagatataagtttgcaagttgtttggtactgtatttattaatcagtcaccattagctaaagaaaagaaacgtgaatctgattcatttcctcttttgatgtctcttttataattaatcatgtagcatttcatttttataactagcgtatactctcgtgctattagataatgtatccttttcgctataacttttcttgaatggcacagaatagtttctttttctatgatgaaatgtaaagagggtttatatttaccaaaattgtcaaatgaataggaatttgaacctacaaattaataaatgcaagactgtgcattcttctacttgagatgagacatccctcgtgggatggtacataatagttggtctgaaaatatgtaagaggtttatttattattgaaaagagaagtaagaaaaatgtgtttttaagagacattttgtgggtgaaataggtttaggtttcaattattaattttatataacatgtttgattgttgtatattatggatgatgaatgatgatgactcggcggttaattgccgccattagcttgggagttggttagtgccaaactttccctaggaaactgtagagtggacgacctttttgaccgtagcattacatagggttcctgtttctgcatctccacagacaaggacttgtaatttatggggcctcactttactctttaccaagtgcagattgcaagtgtacgctggatactaaagtctgacaccataaaaatatacataagattttttttatcttcaaaaactaacgataatatgatagaatttataatatttaaatatattattcattcaattgaattggatttttttaagtatataaaaatttattttgttttaatttaaagtgcaatggcattagcataatactagtattagtcattcaatttttaaagtgctagtagtattacttatgcataacttgtgtactttgcacaaaagacaaagttactttaaagacattatccttactttaaaagacatttgtcttgaaaatacacagaaacacgggcgagtcgtatgcgccagtgcttttgattgtcactggtcagccacattggacagtgtctcaccctttagcctttgggattggacagtgtgtccattgaaaagaggcatattagtgtgaccatagtttacaactttacaagaaagacacttctcacttgatttcatagatagcacatgcatgagccaagctaataaattggtttttgaaaattatcaagggtacggctttggcttagttgacatctttcatcttccaaaagatgttttataaatggtgttaattatggttggtaattggtatatgtcacatgtttcaattctcgcagtaggtacattcttttatactgctacagggtctggtgttggagttattttgttagtatttgtagtaataaaaatttatgacgcattttgtctgtttctttctttcgatttggatccttgggataaatattcattcaacctaatgagatttgactaagaaaaaaaagccacttgacacaatttataattaatgtgggaaaagtcatcgagtttgaatcgttcatactacttttataatgtacaaatgccgatgtagcaaaacagttgtgaaagcnnnnnnnnnnnnnnnnnnnnnnnnnnnnnnnnnnnnnnnnnnnnnnnnnnnnnnnnnnnnnnnnnnnnnnnnnnnnnnnnnnnnnnnnnnnnnnnnnnnnctcgggctcatctgaaaatcggcgtgttgctaaatctcgactattagtcaatgatagaaataatttctataagaagccagtcaaataacgtttccacattagagttagtacgtttccacattagactcagtttcaacatgacattgccccatgtaatttaccaagtccaacactgttcaacttaatagcaaatagttgccaaattatgcttctaggtcaaagtctacattccacggatgttggtgagcctttgagatttgcccttttagtccgattaagctaaattgaatactactatatccttttggtcttaactaagggggtctaattcaattaatagagtagagtgtgtgaattgttgtaaatcttatggtattcctcttccattcctacatataaaaaaaaaaaatcattttggtcttttgcataaaaactctttatgtgcctgagttcagaacctacacaccactaataaaatcaataacaattatcctttgacttttcatttgttttaattttgttatttgttatttgtggcaccatagagaacttgattggaaaaggtggtcacgctgaagtgtacaaaggctacttacccgatggtcaggttatagctgtaaagaggctaatgaagaatgaaaaggatgctgcagacagagctggtgatttcttgacggagcttgggatcatagcacacataaaccacccaaatgcgacgcgccttgttggttttggggttgattgtggcctatactttgtcctacagcttgctccacatggcagtctttcttctttgctttttggtgcggtgctgaatccatcttagcttctctattcatgtcttccttctcttattattccacttcttattggcatggctaacaaagagatgttcaacttgtcaggttctgaatgcttggactggaagataagattcaaggtagctattggggtggcagagggattgcattatctccataaagagtgcccgagacgaatcattcatagggacatcaaggcctccaatatattactaaacgaaaacttcgaagctgaggtactatggtagcagcttataatataaactgaaatttcatatttatattctttctatcatactaggctagggaaataattggcgctgtaataaacttcagatatccgattttggactggcaaagtggctcccaagtaagtggacaaaccacgttgtcttcccaatagaaggaacatttgggttagtgttgtagcttcattgactcacatatttcctattttaaccgttttcttaaaagttaaaacactgcttgcatcaaattgttggctgcagatatttggccccagagtactttatgcatggagttgtggatgagaaaactgatgtatttgcttttggagttttgctgttggagctcataacaggtcaccgtgctgttgattcgaatagtagacaaagtcttgtcatctgggtaagtcttcataaccccctaaatgtcatggagtgtattagactaataggtttcactgagaacacatatcagtgagtctttcacttgaggatttggcaattaagaattcaagatttttatataatgccttgcaaaattcttcttatgttgtcaggcaaagccactgctggacacaaacaatgtaaaggatttagcagaccccagattaggagaggaatatgatcttactgaaatgaagcgcaccatgttgacggcttccatgtgtgtccaccatgcatcctccaagcggccatacatgaatcaggttagaaaatgagcatatgttctttttcagcttagtttgattcgcagcattgttgtaccattttccttgctaggaagctaacttgtattcttgttaaacactacaggttgtgcttctactaaagggtgaagagacaattatagaaccaaagaaaaatttagttgcacagaaatctctcatgttagaggcatgtgacctagaagattatacttgctcaagttacttgaaggacctcaatcgccacaggcaattaatcatggagtaaactaaacaaattataactcattagtgggattttattgttttcccctatgtatatttgttgaaaggatggagtgatattttgtagcagtgtgtgtggtctaatccgaagtcacaagccaagttggcttgttatttagccttgaaatttagggagcgttactcaagaagcaaaatcatagtttttggctttggattaatgcctgagaaccactggttttcaagcaacaatgtagtgttagaaatgatgcagtagggtttgtgtaacttttttattctgcagtgccattcaacacatggatgttccacccatatgaaagtagtctgcgatgaaatgcttcttgttttccatttcccacatggtttaaaattatgtaggaagattggataaacaaaaattgaaaattgatcactgtgcgcgatactgtacatatagaaagcttaacagtataaaaaatatgggaaaatactagcaacatgctttctaatttttttaacacatttttttaacttcaaataaatcttaactagggtattcgcttgttgaattgagttataactaatatgaaaaatactttgatttggacttagttggatttttgtattttttttaaaatcaaagttgaactaagtttagatcaggtcaagccatacaatgatagtatttggttttattgagagaaatatataaaataataaataaatacaattttttttataaataataatttaaaaaataccatgttaaagatcatatagttcataagtttgaaaacaaaaacacgtgactcaaataatatctagttggacttgaatgagttgagactagtttgacctaaagaacttcaaatttgagtaaatgcatttgggttgggccagtcactattcatagataactcgaacatcagaatacattttaaaaaaattcaagtctttttttttttcatcagcaaaaacagaagacattgtcttaaaatgtttctaatatttagcatttaaagtttggttgtaggcattattttgtacttttaatattttcaattattaaaatgaagcaaaatacttaaaagaaggagctctataaagacaaataacaaaaattggaaggtgagcagacatcacgtaacaatatttatttatttatttgtctaatgtaaatgatttaattatttgattcataaaaacataattatgatagccatatcagtgtgattttgaagattccaacattgtaattaattacagaattatatgtctgatttaaattaattaaataacactagtatatagtttaattcaagtttacaatcaaaattctaattctatattacttgattaagggacacaagtcactaccacttgtgtcaacggtggttgataacaaaaatgaatatctaactatctctctcaagcttattatataatacttttttacataaatatattgaaatataatagtgttaaattgttttatataaataacataacaaatatattaatttttttattaaatatatatttattggaaaataaatttaatttgttttcaatattgttgtaaaaaaaaatttatttattccataaatattatcttttttcatttctagataatatctaactatgtttgtcttaatataaaaatttatttttttataaaataattttttttaatattataaaaatatttatgcaatttatttttaatttaaaatcctataagatcagttttacatagaaatcgtataaaatcaatttaagttaatcttataaataaatatttttttgacaaatatttatattataagattgaaattgttaaagtaaaaaaatctaattagttaacatatttatgacaaaatagtattttgattctgtgtttaaaattaatttatacagtataaatttttttaaaatattttcaaattgttttattaatattatcataaatttaattagtttaaatttttagagtagaaatcacaaatatcattcataataaaaatcatacttagaatcatattatgtgttataacactcttttttagaatattttacacaaatacatatcaaagacttgataaattataaagaaataattccttatccaaatagttaatagaattgcacataaaaaactcaataatatttatttttaattttaaaacttataatatcatttttaattagaaattatttttacaaaatatatatttttattaaaattaatttattaaatatatttttattacaagattatttttttgcaactttattacaaggtaattttaaattaattatccaataatatcataaattatattagttttaatttttacataatatgtagtaacattaaaatgtatttttattacaaaatagttttaaattactcactaaataagcttttttttagtattttacataagtgcaggccaaagactcaatcatatcataaattaaaaataattttaattacaatagagactccaaatattattcatgttagacgacaaagttctttttttgagtaattaagacaattgcatatcaaagactaaacaatgtttatttttactttggaaactcatttttacataaataaataataactattaaaataaatttattaaatatatttgtattacaatacttcaaaaatacttactcagtggtatcatcacttgaattattttttaataataaaaaccaaaagtatcattaatgaaaaatgatgaacattattttaggcgaaccattatggataacatagctctcatttgaaatgttataaaatcatttttacttgaaaatcataaaataattttatgaataaaccattttttaataatatttatattatgtagttgaaatttctatactataaattaatttaaatctaattacttgatatatttattataaaatactattttgtctctttctttaatatttataaaataaggttaaatattattatttcataattatatatgaatattttaatattagtttattaaatatatttttattacaaaatattacgtactgaaaatcataaattacattaattgtaatgatgttgatttttttttacataaatacataataaatatattgaaataaaatttattaagatagaaacaaataagaatacgaacaatagcttcaattttcaaataataaaatacaatgatttaagtagcctaaaaattagaattttggttgatttttgctctattattctaatcatttgtttcatgttagagaatataaatactaaataattaattatgtttattttaatataaaattttaattttataagaaaatatggtaagcatctaaaaattgattcattgtatttataatatttatcgctctataaaatattaatcatatttctcataattatgcatatttgtacactacaacaataataattgagtgtattttgaatcaacaatgactatttcggtaagtacttttaggaaataatgtcttgagattcaatactcttggttgcaatttacaaattcaataattattgataatatactttttaatataaaaatctaaaaaaagataatctcaactattatactacaaattttgctgataagtatttttagagatatacatttgtcttgacactaattagtcaatatttgaatttttttattacataaaacactaatttgttaatatagtttgacattaggtaccactttaccacatcagattcaactaagactctacatgcaaatataatttgtcattttgggttataagttgcttttgaaatggaaccgtaacagttgtgttaggacatccaaatacaattatgttattttgctaatttattataatcgatatagttatatttaagataagagatttgattaaactcttttcttaatattgtaagtttgtaagtgtctttttggttatgtagtttattgtcaaccctaactatattacatacactcatttaaaaagacaatcactttctgatgacataaaacactaatttgctaatataatttgtcactagatattttcttactatgatagattcaactacgattatacatgcaaatgtaatttgtcaatttggattataagtttcttttgaaatttattgtaataggcatagttatctttaagagttttgattaaactcatttcttagtatcgtagctctctctttttggcgatgcagtctattgtcaatcctaactggattatatacactcatttaaaaagacaatcactagcaatattttgctttttaaaaagtcaatcaataatatatttttcttttaaatatatagtcttaattaattgctcatttcacatatatatcatttgtcaattgatataaaaagcttacgcagcggtattattcatgcgtacgcacaagtatcgtactagttcattttttgaaattaaagtgcgatagcaaattaatctctaaaagatgaaaaatataaatttaattcacgaatatgcaaagtgataaattaagctgctattaaatttgtaaaatcattttgttattaagttgaaatggtcaatgaccaatttgacaataaactatattatttgaaagactaatttcatattaagttataaagttgagaagtcaatttatcattagattattcacatgactaatttatcaccttttacctatctaaatttaaatttttttatctttcaaagattaatttatcattgtcttacacttttaacaataaatttgatttattaccatgtatttttagtggattcaaaattaaaaaaaaaaaaaaactacccatttagaattctctctcgcatctgaacaggtccctgctgttacaagataccaaagtttagagtttaggtttaattttttttataaatattttaaaaaaatgtcatcttttattttgaaaattatagaacagtaaaagtaattaaagaaaaattcctccatttcctatataatattttaaaaagaaaactaaatgaaaatcaaatgatattttttattaagtacaaacatggaatgaaaaatacaaaatattttcattgttaaaacagtttccaaaaccatattgagccataacttaacttcaaacatttttattcacattatgtaatctagacattattttttttcaagtgaattatatttcgaaaaagctacgatttgcgttattgatggatcattccatcatgccaggatatgctcatttgggcagacgagggaaccatcaacttcacttcagaagagttatgaactgtaatttaaaacatgaagccaaattgacaattaaacaaaagcgatcatactaatgctgcaagctaagccattgaggaaattcttgtgcaaaattatgatgcacgaaatatttctcatttcttaagcagttagttacatatccagcttcctactgtaaccaagactagccaactcaaaaacctcctcttttttttctttttctttttccttttttagtttaggttaataatagaggaggggggtcagctaaactgtgccagagactatggcgtttgatttgttagcataaccaggaaattagaaaaagattttgattctagttttgattagatcaataagactgatgaggccaaataaagaactcagttgctgctgatgctggcagtgcagttagtgcggttgcattggcagaagtaacagcagacgctgctgcaccagcgttggtagggtgaaaatgttggaaaaggttgtgaggataatatgctgttgttgaatcaaacggaattccacaagggattgaagcaattggctgatgaatggctgagaaattgatgctaccactcacgttaccacactgtggattctgctgctgactgctgctgttcacaggaggagctttctgctctgattcaagggaaagcctcaagcgttttgctgccccacccactggaagagaactcttcattatagcttccacatcatatctattcatctcaaagttggttaccgcgtttgcacctctgaactttatggctgcaatatcatatgcctctgctgcttcctcctcggttgctgttaccatgtgaactgagttagatgattattcagaatattctatttccacctcatataaatgacaaacaatgtaaaatcactgtttcaagtcaagccagcaaaacaacaagaaaattaaagattagttaaaaaggtctaaagattggactggtctactatgtaggcaaattatcaatatatgggctagttgattgtcagtccttatgtttactgttattttatgtgctatgatcttatctactatgatcatctatttttgtacttttgaccaggaataaggatgcggtgaaacttgaccattaacaataatccattaaaaagtttaaaacaatacaataattttttataacatagcaactatggaagaaaacgtgtataccgaatgttcccaagtataaatctttgtttccagctacacggccaattcttgcttgccacctaccctgttgatgatgcctgcaagatacaaattatgagtatagaaacataggatcaagtacatcaataaataatttaaagttactaaccttgtaacacctctgtatatggaagctcccctggagaaaccactacttttcctgcaagaatggaaatccgaatattcagtagctgcgtatgtagaagtacaatgctagaattttaataggacaactcaagcaaacctccgcaatgatgcaataaattcttgctttgttacatgtttcatctcctccacttccttcgaataattggaaacctgagaaatgaggatagaaataaggtcagtgagacagtgacgtgtgttccaatactgatccatgcataacctcagttcattatatatgtacaatgcacccaagaagttattgacatatcaacgacttcagaagctatatatgtacaagttcaccccaaacaaaaaccgaagctatctacataaacataatacttaaatagttatattccccccacccccacctaccctcttttcatccatgccacgttggtctgaagatcctatattcccttttcatggcaccttagcctcaagtttttgtgtactaagtaaagcatatttctttcacaccaacaccaaccattaaccactttccattttagcaaattttttgtatatactggcatatttaaatatgaacactaaacattattccttccgtagaatctctccttcggccccacctcaacgttttcagtcctggtatatatatgtattggatttcatgcaactaatatctatcaaaactgaatacaagaaagatgtgactgcattacagggaagttggtggtagcagtgggaccccagtactttagagctgccaaatcataagctctcgcggccttttcttccttatcatatccacctgataaccacgacaatttactatgtcacaaaaccatctctcaaacaacataaatttttttaagataagttgagcagatttcttgaagtaaatctaaatgaaaaatactgcttacccaaataaactgtagaagagtcaaaaagtcaaatgacagccagaaatgcaccaaagtcccgttccatgcaaaggaaaatacaaaaatatcaaacatcagctaacggaatagtcaaagttatctgccaaaaattacttttctaacccaaaatgcaaatggccgaaagaaaagtgatcatatgctagccaattgccacaatgcatgcgcacaagcaaccttttttttttcctttattttttttctctcacgccctttatggctgctacataggatagaaaacaactgtacattggattagatccatcaaaccccatcctcttttccttgtacaatgactcgtcaaattttatttgtaccaaaacgttcaaactattaacaacattaattttaaagttatcgtatctgtgcttttcaatttttcttttccagttgataaatttttcaataatcccactaagtagctcatagtcaaagacatgccccagcatttaaaaaacagaccgaaaaagaaatgccgaattgcctatttctcattggaacgatttttagacaaatcgcttttttgccgtttctttctcttctttcttccaataataacgacacttaaaatatatatagttatttgtcattgcaacataagatctaagaaatcccgtgagtttgtttcagaccaaagagaggacattattctggggggcagacacactgtcacaaacccttcaggcaacagtgggcgccccaccacctcaatgtgagcaagtacaagtttcaatatgagttgttatgtggtcaaacgtagctttccctggcaagtgggaaagcaaaagcaaaagataaagcccttaacgcaacaatatcagttatgacttatgactaatgaggaaggggaaggacggagagataagataatagacatggatgcgtcaacaaagggggtacggaagaggaagagaatgcagagagaaataatgagagatataatatgtctgagcagacaagaaagcaaacacacccaactcataaggggcaaaatggcggcacataggatcaaatcaattgaaagaaaattgcagaaacagtgaagtagtagtaataagcagcactagcagcatagtatgtgcatataccccaatcagtcaatcataaaaaagactgttcacaaagaaacccaggtgtcctaccacactccaaccattaattgcaccttcaatgcatgcaagccacttttcagtcatatagcatcatagcctattctattcctccattttatatatttttccccatttttatttacttcaaaaaaaaagaaaacatagagagagaaatagaccttgacgcccttttctggcttgaccctcccttctgcaactattgtcccatagatgcgcttcatatcttcctgtccatcggtgcctgaagagaagaatcccatcacaaaaaaaaaataaaaaaatctaacatgaaatagatgtgtgagaagaggccaaatttctgaccttgacccccctctctctctctcaccatagtcaatactcagtatccaaaatcactgtctcaatatattttcacaactgaacaacaatagctggctggctactttttttcaacttccaacatgcccaaaagatcctttggactagaaaaagagaaacatctattctctcatttctttaccacaagcaccatacacacaaaataataaaaataaaaacataaacggtaattgattgattcaataataataataataataataaagaaatgaagaaaaatagtatacctagtaacacctctgtaaatagaagtccgctggccgaaggtatccacgatcttcttcgagctattggactccgccgcgacaacggccttctcggagctcagtgcaacggcgagcgacaaggttccggttgtgccaccggagaacgcggcgaactcgttgccggaggactcaatagagtgagtcccgaactcgctggcctgcgcttttccgatggatgcagaatcatcaacctcggaaccggagttggtcgaaaaagcttgaaatccagtaatggccttgagatcctgctggtcaccgccgaagtacgaagtagaaccgtggtggtggtggtggtggtggtggtggtcgtagatgtgcgtcagcgacgagtcctgcgtctccgtctggctgtcggagtaacgcatcacggcggaggagtcgccgagaaaatcctccagcttcggcggcggcggcggcacgtggccgacgctctgcgacgaagattcaacaaaactcacgtcactgtggttgagattctgctcaaacttgaggctcccgttgccccaccctgcaccataaaacgaaccgtttcggtcatttcccacgtgcgttaaatcgaactagtaagaactaagatggaaaaaaaaaatagatactattttaatttttattaccgttggtgtacaagttgtcgaggtagtagtgatgtgaggaagtagcggaagcggcgtcgtattgaaggaactgaggttcggaggttcggagcatttccattggggagagagagaacgaaagccagttagtagcacgagccattgagatatatgaatgaaatggtgcaaaatgaagaactagtcctgtagtaataagaacaaatcactgaaatcagcaacagtttataaacacaaaaaggccccaaaaaaactgaaatactttcttactctttgaacggacagctacttcttctccatgtcggtgtggtggtgatattatagttactattatttttcgattaaatgaaaaagaatagatcaagtggttttggtttggttaaggggagaactaagagaagtagaatgcatgcaaggtgttgttgctcgttttcagcgaagagagagagagagagagatggtgatgagttgatttatataatagcaacagtttcagcgtaaaggcagagggtttcattttgcagtgagtgagagagagaaattataactaataagaataagaattaaataatggagagaagtgacttttggctctgcgcggaagaaaatttgtctgaaacacgtccgcgaaagatccgggctcgggctcgggctggcggaaaaaaattgaaggatttgtttgatagggttcgcttaggggattgatggtcacttacggaaatgcccttggagggttcttttcttttttaaggaagggaaattaaatttggggtttggcatttcacacacttgtcttacatgcagttctcccgggaatgggtttgggttcagtccccacttactcattcctaccaaccaatctgtgtcatttttcacattcaactttgatcgtgccagtaagtgagacccggattagagccacgaaaattaaattgttttcggattagatggttatacttattgtgtaatggagtaaatttaaaagatttataataatgaattataaatcatcaaataagtgaattagatgttatattttaattcaaaattttaagatttatttttatgaatcttaccttataagatatttaatcattttatttttatattagacgttatctcatatttatattttaacaatatttcctttaaggatgaatctcatttacattgtagtttctcctcgtgtatttcttggtttgttgaaaaaaaattaaatgattcttaaaaaggaatgaagttagaagttaacttcatctaattttctaaatctcattaacaattaagttcattttctaaactaccattcattcataggaatttgtttcaatggaaatattttttcttggtttttaaagtcatgtagttaatatcacaaaaatcaaagaggtgagtaaaaatgatatatgtaatattcttgattgttaatttctgagcgcttcatatgctatgatatttcacttaattttttattggtcagaacttttcaccaatcagaaccctccccaagtagtcatttttgagacatcaacaatctatttcgatcgcctctaggattaatgagtgttttcacaaaccaacatgagaactttttaacatgttttgtccttactcacacgtttctggaaaattttctagaaggtcattcatctgatacctatttcaagccaaacacacttaactgtggagttcttaagttataagcatgtgatcaattgcatgaagttgtttaagtttaacaaataatctcgagttcaagtcttagatatacagttgcattaaataattagaattttttttatgaattacttttcatgaagaatatctgtcgtctaaaaaaattatcatatatattaatttttttattcatattcaaatccaaaaggatatatacttggcacaaaaatatagtatttttttatttcttatttaaagaacccaaacaaactaatactccctcccatcttttttaataatacttaattaactaatttatcaaaattaaagaaattagttaatgtagttaatacttagtggcaataaatttgtgttaactttatataatatttcaaaattaaccctaatactattattgaaacatatttttattagttgtaattccttgaatctctttcattattatcaataaatagttaatttgagtgatattaagtcgagtcttcttaagtaaaatattgagtttgagtctcataaataaaaaaatgtgattgaaagaaaaatattctactaaagatggtcaatgagattttccaacaaaaaatatttattagcaaaactggtgaatactttacactagtatcacaatgacaaaaaatctcttttatcattaatatatttcttactttattttttattggctatgcatgagactagtcaaaatattttttcaaaatattctttatacaagataatgttaattagactctcaaagaatttaagggattaatatattccttttattatttagtaaattaaaaatattctagttagaattgaattgcgtgaaattttacaatccatatttttcctaaaccaaaaaagttcaagctagtagtattttaatatttctttgaaaacagtgtttgttcgtgaaaccgtggagagaagcaagataatgcaccatagagaaatgaaataaaacagtactagccaacgaatccctttagccatgccataaaaaaattaaccttaattttagcaatgtttcattggaggtcagcctttttaacggtatatctttaaagaagagcctatgaagattatcttttaaatttggttgtctgcaataatgcaatgcataaaatcccaaagttaaaatcaattttcagcttttcacagacataagaattgagacaatcaacactcctctagctagccagatagactatgaactcgacttgtcctcatcggcacctctgtgcaactcttgcaaatctcaaatctgtcaccttcactgcccttacattgccaccgcttctttccccttgtagatttatatgttcttaactatatatatattactattattcagggtatatattaattgtcgttgtccatggtggctggggttgtgctaggtgcaaccccaactatatatacgaacgggatacagaaccatgcaattgtagataattgtcgtaagacaattccataagaaactcggttgagtctagtagaaaaaagggtatatagaaccaaccagctaaaacaagttctcgaccaaggattggagacagagagcgttgaagcggtgtccatgcagcacaaattttgttgtttgttggtttttttttttttttttcacggagaaaacaaactatgattgaaactttatattatacgcatacataattaaattgtaccgatatgaactctccgtcaaaaaaataaaattatacaaactcttaaataattaataaatattttgtaggatattttttttaaaaaaattattattaaattaaacttatatattatattgattaatatttatgttattttctctctctatatatataggatgaattacactattgaacaaattttttaagtaatttaatcaagtttattaaacttgagaatttttgtaaactcgtgagagatctataaattcaatttgtgaactcaattaactcgtaaatttgtaagaattcacttcatataaaaataataacaaaatatctataaatagaatatcaattaaacattttaacaatataataaagtaaaatagtaaatcataaatttcactatacttaaataacaagcctagtaatgtatcactactggataataaattgcagatgttatagtagtgatagattattttcatagaaaatttgatgttattaaaaaacaaaagtttgatgttattaaaggtgataattaaaaaacaaaagtttgatgttattaaaggtgataatttttttattcgggaacaacacactaaatgaatgtatattgaatattaaacagacacaaaaataacccaaaataacttacattttgatttaatttttttaacttgctgactcgctaatttgatgttaaactcgagagtctatcaagtttactttaaatttttatagagtctactaaaaggagaaagttcacacgagttaatttgcaagtggactcgtaaacttaagaatcagtgaattaactcaaaaatttgataatcatgaatttaattgttgaattaatttttttattaaatatatttcatgtacacagttttgtaaaaatttaaacttatttgaaatttaaaattattttaattttttttaaaataacttatcttataatattttttttaaaatgagtaaattctgattctattaatacttaactatagtatgatcgttttttttttttttttttaattttcacaatttgtgaatcccataaccccgacattgataattttcctcaacgacagggtacattagttgatgtggatgtaactttcacccaaaaaaaagttgatgtagatgtaatatatatatataaattacgatatgttgtgttttggaaacaatttatagttactttgttaagtgggaaaacaatatctcgtaccctcttaattacctttatctagttacattatcattcttagcaatgtctttccaacttggagatcattgagagcatatttctgttcaacgaaagaaacttattgtaacttatcgcgtagaatatatagcatcattacattcaactcagcttattgcaaatatgatgatgagtcccaattcaatcaaacaaaagcgaatttttccaaacaggaaacccacatatcatatcatagatctaaaagccactgaaacttttccttccttcttatccatcgtaatgatacttcacgagcacaattattagatttaagatgttcatgaaattattttaaaaaaataaaagttgaattacatattttatcacttaactattattattttattaatgttaccatttaattttttttctgcacattttaattatcatcataattttgatttttacaaattttaccacctaaatttttttgtacacattagacgatcacttttaaaaaatcatgcattttaccatcatgataacaactgatatcgttttgcaaaaattaatgacaaaatacatttttttatgaatacatcaattcattacacatttaaagaatcagtaaaatacataaaaattgaaaaatacaatgctaaaatgtgggtggggtggatggggaacttgagtgataaattttgaaaaatggtgatagttggtgataaatgtgcaattgaatatcaaaaagtaataatattcaaatcatataatgtgtttttaaattacagcttattttaaaaaaaatcatattttttaacattttaagaaatctttaaaagattagctattttcataaattagttcttttctaacttaaagggataggttagcctcttgtttggtagtgcaaaaaccgagagggggagcaaggaagacaaggaaagtgaggacaataggatgatggtttagttgtatgaaaataagattaatttttgaatttttgtgatatccacgactaaaaacatatcctctaatctgagagaaattgttattgttgcaacatctttcccatcttgccctctcttatggaattcgggaggaatgaacacaactttcgttgttataaaattcacaaagtttagattccatttatgcaaaaaaaaaatgtcttgtttttgtcctaataaaattaggatgcctcatttttttaatttagtgcaagatttggatttccaaacgggtataacttatttacattagttatatgtaagtttcaaaaacaatcaaaaccttgcttgaagctaaaaaatgcatattataattttattagaacgaaatattgatgaaaaattctaaagggacgaaatattaaatttgtcaattttacaaaaacatatttcagcctatttaaaattatgaaagatatagagatataatatttgaagtgtttttcttttttatagaaagtgttagctagcataacaagtataatcagttttttaaaaataaaaaacaagacaaaacagaaatgaataaacttaccaaaaggtaaaaatgcatttttattcaatattatttttctcttttaatttttttaactagtaaataattttaattcaaatatttgtcatctatttctctccatttctcttccgctaaacaatctatttccatcatatttctcacttattttctcacatattcactaatttcattatcttcattttctttctcacaaccaaagataccctaaacctttcaatcatttagtataattggccatttttgttagagatgttaaaataggtctaccgatccaatttatctttggtctagcaaaggacgagttgaattgggtatagtctattttgatatcaaattaaaaattctaacccaattcaattcaagaaattaccagttacattaagttagttcaccaaatcacacttatataaaataaataaatgatgagaataaaaaataactattataaaattaatctttgaataacttgatctcttctttatatatatataatttaaaagtaaacatatgatcattataatcacaagaatgttatcttacttaccacatatgctctgttatttaccatgagtaaaacaaatatagtgtaaaaaaatattcataatagtctataaaatatattatgtccaacaaagcaacaatcaaccaaataattcatcaaaacaataaacaaaatcccaacccatcagcgaataaaaccaattcactccaatcatatatatcattttacatttacaataaacacatagatatgctcaatagataaatttattttaagagtattctttatcttttttctattagtttaatgattaaatatgagttactcattaaaatcattaaatcaaatatgaaaattaattagattcctcttcatatattaaaaaaaattaacttattaagagtaacatcaaataaattattctttatactcaccctcatccttagattaaaaaataaaaataagaatgaaaagtaattccaaaaagaattaacttaatccctccttttatattttttgtatgcaacctccttttttatatgtatattaaccgttgttagtcaaacttcaacgcatcactgtggagtaaccgatgagacgagaggagggcaatacattgctcccttggcacaacatcaagctccttttccgggataaattattaatatttcgataaggttactctcaactgataagacttggttacaaatgtgtcaaatgtaattattcatatcatattaaaatttttcacaagaactattattgtaaaaaaaatatataacaacttttgccctttttgcctgcttgttccaaagaaatggcaacatcaagtttctgtgaacgaattaaaaagcagagtggaacgcacactgcgccaccccactagaccagtgcccgagaaaactggaagcatgagcagtaaattgcttcattcatcaccttctagctgtagcataagaccaagttgaatacactatatgtgtatgtgtatgtgtatgtgtaatgtgtcacttttaatttaagatcaaaatcatggactcagccccgggaaacatgagtgcataaagcagtgccgacgaatacgcatcatcctctgcgttctaccacttctagaccggcagcacctacgcacccttccaattagcatccaatgttatttgcactttacactttctctttcttcctaccacccttaattactctattattcatagttaatgtaaaaataaaattattcaatcatgttaatacccttcagtatgtactatgacatgttcttgcattttttgttttttacagatctaagatacatacactcgtaattaatgaatgcaatccggaaaatgctacccttcagtatatttatttagcacattgatgaagtgaattccacgctggattcattgcacttttgtctctttagaagttgctcatttatttatgcaatgtttgttttgattacatgctgttatattattaacaaattaataaaacaaataccgtagtcattaagattttaagatagttaaaccattgcaaaaatatgaatgaattaatgaatagatgaggtaacatagtatgcaattagatgatcatagggtaaattaattttgatacttctaataaaaaaaatgaacgtttttttttatctcttctaacattaattatgatatccataccatttatgttttgctaaacatgaataaactttactatggttgatataattatcaataaattcaaccgccccttcttgtttacgaccagatccatgcatacagtcaagaaatttaagttatcgatggaagtgattgtatgtaaggcgtatgaatcgattaactatactattaattaactgctagcatggctgtgtgcttgattaaaaaaagaataattattggggtcattgagacttgagagatgtgatgcgttcaaagctcaaatcgtaagtttgttttttttaatctttttttaattaaaaaatatgcaaaaaaatgtgatttaagagcgtgtatatctaatgcacataatgaatatttgaaaattttaaaatagtatatataaaatttattaatattctcgtacatagttacatatacttgtactcaatgacgaagccaattcagttaaatataaaaatattgattttttaatgccataagagtagtattggttaagaaacatttaatacttcttattaaaggcttttcattgcttttaaaatgttaaatattttttttctctgaaaattatatattattttactttttaataagtaatttatttttattttccttaatcaatgtcgtggttaataggccaaaaagataaacagttagctattattagttgactatagtaaggtatagtattcatattaaagcttcttttttcctttttccttaattccaggtgcttttcctcataaggtggctgtttctaaaactaaaagaatttgctctgagttttgattaaaaattgattccgtgtaaaaaagaaaagcactcatcaatagatcacgtgtaagtgttcaattccttttattttctgttatactgctgtagtaatattttacagcatttgcattgtgaattttgcaaaactattcattccaatgtaccattattacaacgggactaaaaagtaatgagggaggggaaagcaggtacaattaaaacgtagtttatcaaagccgtgtgaacaacacgagtaatagtcaaaaagttcaactctatctacctgcattaacagcttttactatcaaatttatacaataaattatatacaagaatatatatatatacacactaaaataatcaatgtatatgattaaaagtaaaaaataaatatataagacttatcactaattttattgtatgtataaattgaaaataataacgttattctttattcattgaacatgcctttgagtctacgtacatttttcacgcataacttgactctcaaataaacctacctatatgtctatggttctctctccttggaggaagcagtgcatgggcacacgtagatgaaggatgaagagatagatatgcacgtagtagtggctgatttgttgggtcttcggtgcaacaccaactcaagcaaagtaacttttttttttctaaaccactgctattatcatgtttgaattgagttataaataataaatctctccctctaagtattctataaaagttgtgagtttgaaggtaactcaattctaaaagttaggtgaagaaatgaggattattttttatttatatattttaatttaattttatcttgatttggaattttggttttttttaatacatcttctcatgtccgatcattgttgagcttacatgaataatatgattaatgactctctttaaattaatcttgaatatagtcttatatcatcttaaattcttaaaatatgaaactttatctttaattgaatatttgagtttttcccaatagttatatttatactatggcaacttctgttttgtttttcttcttccggtcgagttatagctacttatttctgtagttgtttgctacctataaaaacttttcgtgttggtgatgatgcctttcatttccagatgccgtggccatcttgttaattacctagtatctcctcatcaatattattcaccacacgtacgtaccgtgaaaaacaccgttagggctacctctgtatacacacagtcgatactctcaaatgaaactcatccacactgaggacacacgaacgcgtgatcataatgaaaatctgatgtcatgaacaattatagagtgggataacatttgccctctatttgttatatgaaaataaattaaaaggaaggaagaaatatataaaagagatgtgatagaaattaatgttaatttttataatttattcaataaaaaataggaaagaaataatttgtttctttgagaccacccaaaaacatttcactatcttttacattctatttttttttttatttctattgttttttttctttatatccgcctctattcctaatagaggattaatatttttcaatgtgtagaaacatcgaaaaggatttaatcatgagaaataaaaatgttttatgacgataaaaacattgatgatatatatttatttcttataaaaataattgatgttgttttagtgaaaaaatatatggttgttaagcatgcaactttataatttttttttgtatttgaattcaagaaatagcatattatttttgtttccaccgtagtataatttttgtttgataaaaaataaattgttgatatctattgtgattttatagtaacaatatgatacattattttgttagcataaacttgcaatatttatattaaaaattgaattttatttaaataaagtgtataccaacgaaaacatagataagtctaacttttgatatgagaattttttttaggattggaaggttctagaaatacattgaaaaaaaaaactttaaataattgttgctttaattgattcaagaaaaagatttttgtaggtaattttatttaaacaaaacaacggagttatttgaagtttttttttaagtcagagttgtttcccctgttgattcctttagatttaggatagtttgggatcataacaaagcaagagctgtcaatatgccagcttaaaaaattgctataattatatgagcgaactttgactaaaactttgtcgtgtagtgtattaattataatcaaaatttgcgtcaattatatatgtttgtcatattgctgttacacgaattaaacttgccattcaacttgaaaaataaagatcaggaagaaatttactttagtttatgtttttcctttcatcttagcaaaaaaaaaaaattgaaaataaaataattttttcatcgtatgttgtattagggtccatctgaaaggaatgtatgcgaaagaaaagaaaattgaaagggaaaaaaatatttatactgatatttttttcttttatttgattgaagataaagtgtaagaaaagaaagaaagaataattgacttttagaaacacaaatttaatttttcttttatttcatttttcttctaatttaaatttcaaaattttcttttctctctcctaaacatataataaattttctctttacattaaaaattaattctattatgttctttagtcaaaggtttaaaactaatctaaggtagcgtcgtaaaatatagtgcatgtttgtttctctagttattttattgcaatacaaagtcctaagcaacttaaatgcataagtattgaaaagcttacttctccaaacagaagttcaaattgtgacaaccacaatccaaacatgcgcatggtactttatttatgcctgtgcctagtggattactactctcatattattgtcattttgcttatgcaagaacaattatacaaaatgtgctatttatatcatttattaatgcttatattatattaataataattatactttagcaatatattgttatgaatgtgatttgaaattaaaataaagtatttatttttgggccaattttattttggtaccctgctggtaatgaaattttttatagcatgagtttgtacatcctatttattttatatctttttgttaattgcgagatgcatttttttatattccttaaaatgaaaaaaatcttgaaattcagatcgattttttcaattcatttccattttgagttggacaacatcatgatataaataagaaattttgtatgctgaacatattatattattaatatattaaaataattttattgtttttccgctggttattatgtcagttacatgataactttgaatgggatcaattatgagaattgagagaatctttgtatttgcatttgatcattatcaacatctactttgagggaacaagagcctccagctcttactactaagtctactctttctgctaagtctactgctactcagaggattttaatgaatgatggaaactctacagttcaaggaaccattgtacatatgctaagacttttttgaagtttgttgacgaaacgccttttgatgagactcggaaaagtcaatatttcttattcatattcaataactcaatgtatttttatgttaattagttgtgttagttaattaatagttagcatacgatatatatatatatatatatatatatatatatatatatatatatatatatatatatatatatatatatataagattgatgatcattacctgattccgaagattttagtttcactgtatcttctcaatttgacattttgaagttctcttgtaacacttagaatcataagtaaaccatcactactatatgatcttaaataacactattttatctaacacttaaaaaaatattaaaaaattataatatttttaaaaatatcattaaatataaataaatattattaatatattttataacattttatcaaatgttatatataactcatatctttaaaaattttaataatataaattatagataatatttaataaaatatcttaaaaatatatcaacaatatttattcatattgatgatattttttaagtattattaaaagttttttttggtaagtgttaaaaaaaatgttaaaatttacatacgtaagtactgtattgatgatattgttgctatttattactcgagatcgaggagaagtccatcaagaaggataaatcttatattacagttttcagttcgcttctaagcactacaatgtacatttagtattaaggatgtggacaaatatatatacgaagaatttcaacatataatggtaagaaggtcgaaattgcatcctaatatttggggtctaacaagaagttctacattaagaatttcaagtaccgtaacaagtttgtgttaaaagagaacaatgacatacaagtttttatagaagatgttttttttctttaattttcaaattaaaaaattactgtagttataatatatgtaaaactactccacataacttctatttacaagaaactaccactaacttctatttacacgtcaacattccctctcttaaattatatgaaaaagaaaaacaaacatttagtttatcactaatgcatcaaccattcccaacatatttcgtaattttaagaattgttctaacttgagaggctttatcattatgtctgcaatctgttcttgagaattacagtaactcaactccacaattttgtctctgatcaaatctctaagaaaatgaaatcttatatcaatatgtttgcttctatcatgaaaaacagaattctttgatagttgtataatagaattattgtcacattgaatcaaagttattctcatgttattctcatcatcatcatatattccccccttccatgttattctcatcatcatcattgttctactttaaagcatctgatctgcattcctcattgcttttgccctaattccaacattcatcttcttgaaaaatcacatccttgctaatgatgattttcttcgaaactggatcatataatctgtatgcctttgattcatcacttactcccaagaaaacacacttcttgcttttttcatctaatttgttctcttctggtttgggacatgtgcatgagctacacacccaaaaactcgaaagtaatcaaccattggcttcacatcgctccatgcctcttctggggttttgttctgcacagccacagtgggacatctattgaggatatgcacactccattttacagcttcgggccaaaacattttaggaacctgcttctcagctaacatagaacgcaccatgttcattatcgttctatttttcctctctacaaccccgttttgttgacgagtataggctgcagtcaattgcctactaatgccttgatttttgcaaaattctacaaactcatttgaggtaaattcaccacctctatctgtcctcaaagaagcaatatatgcaccaatctccttttcaacacgagctttaaaatttctaaacatggaaaaagcttctgatttttcatgtaagaaataaatccaagttttacgagtgaaatcatcaataaaacttaggatgtacctcttgttgctgtttgattctggtttaataggcccgcatatgtttgcatacacaagttgtagcttgtttgatgctctccataaactcttcttaggcatagagtctctgtgttgctttccagttaaacattctatgcatatcttctttggaatcttaatcgaaggcaacccatttaccatcttcttatcaaaaagtgtcctcaatccgttgtagcctaagtgaccaaaccgacaatgccaaagatgagattcattttctgatacaatttggaaacatgaagaagcttttggtatcatggtagccaacaaagaaaacattatatttccactcatatctgtctgcataattaatccttttgcaaaatgatataccctacacttcccatgttgaatcaaaatagtcaagcctttttcttgaagtttccctatgctcaataaattactcttaagttcaggaacataatagacaccagaaattgcctgagtaaatccattcacttgcattcgaatgatacattttcccacaacagccattctagtgttattgccaagttttacagtttggctaaagctttcatccagttctgagaaccactccctgtttccagtcatatgattgctgcaactggagtcaaggaaccacacttctttcattttatctttctccagttcaacataagacattaataacaattcttcatttttttccttttctaattcaacataattgacatttttctcccaatcaggacattcagattgatagtgtcctaacttgtgacatttgaaacattcaatagcagctttattgaatgattgtcttccccttcctctgcctcgacctcctctggatgatccattacctctagctctacctctacctactttgtcttggtgggagatcttcagaacctactcttcttctccacgacttctcatcctctgctcatgaacaagaagactactttgcaactcatcaatactcatcatgtctaagttgttggattcttcaatgagcataccacataatcaaattttgagaccattgatctcaaaatctttgcagtaatgactgtttcattcatactttcaccatgagccttcaatttgttggatatggttagagtacatgagaaatatgcattcactgtctctccttccttcatttgaagaatctcaaaatctttgcgtaaagcttgcaattgagcctttttgaccctggttgaaccttgaaatttttgcttcattgaatcccatatattttttgtcgtgtccctcttgaggattgtttcaaggacttcacgatctattgcctgaaaaagataattctttacctttaagtccttcaacttctgctcctcgatcaatttgcattgtgcctccataggctctattccatctgccaccatcaatatcccattctcaatgagatcccaatattctttggagcggagaaaattctccatcaacattgcccaatgatctaatgaccatcaaaccttggaattgcaggctgcacaaaactgctactcccaccttttgccattcttctcaactccttctacttaaaagaaaaaaaaaattgcagtttctttcttgactcactcactgttttcctcacatgcactcaatattaggcccctagaatggagctctgatactaattgttaaaagagaacaatgacatacaagttttcagagagaatactctttttcttaatcttcaaattaaactactgcagttacaatatatgtaaaattactccacataactactccacataacttctatttacaagaaattactatttacttctatttacacgtcaacagtttggacataatttgagtgacagccgtgtctttaagaagaaaaaccaaaagcaatgaatttatgagcctaataaaattaagtgaaagttgagtatcaaatcactgtggatatagtttctttaaatctatcttctggacgagtttatgagcctaataaaactaataaaattaagtgaaagttgattatcaaatcattgtggatgtagtttctttaaatctatcttctggacatttcttagtttttgtttgggttatctctattcggataaatttaattccaattttactttttcaataatataattttacttacagtttttgagtttagaaatgaaaaatttgttaagcataaatgtcgatgacttttatattaaaacaagttaataaaattatctttcataataatttataaataaatgacaaattttaaactaaatatatagactatttactcatatgatgtaaaacggtagaaagctttcaaatgttcattgttgagttgtgtttgatgactgaattattgtattatatccttcaaatatgcacaattatatcaacttaaacatgaaagagaatccaactcaattaatggagtaaaatgtaagaattgttataaactctttagcatctgatttaaatttttacagatgaaaaaaaaaaacacaaatgaagccattccaatatttgtactattgtatatgttggagaatataaattttgattggaccggggtacaagttgtgtacgttcagaatcacaatcccttttgtaggtttgagtaatgtctagtactgccacctttgcttgttcttgtctatcaccttttgaaatgccatgtgacatcacacgtggtgcactccagacaacacgaatgtgcaaaactgcctctctgctctccaatttggacagttaaattaatgtgcatatatatgttactttattaaatattaaaatcaaaacgtggtggttctgtgttttgcagcatgatatcgattgatgatatttctacatatttcctattattatcttctctccatcatgtttatagttttatttattattatttgaggtagaagatcaatttttaaaagagacaaccaagtttcggttttgtttaagactttagaagcatgcttttaaggttgaagtacacgtctctaagccaaaccaaatatatataatatgcaagcttgcctaactacattgcaacttgaagttcgaccctaagctatcttagacgtttggaaaagaaagagaataaaaaattaaaagaaagagataattaactaattgctttctatttctatttatgtatttgagattctaaaaaagtatagaaaattaaaataaatgattgatttgaaatatcaccattttaaaattatacttttcctctttcaaataaaaatgcttaataccaacattacaatgatttaagtggaactgaactcaaagaaatatctcaagtttaaaggttaaagatgaaaaaatattattcaaaagaattttttttactaaaaatggttaagtatgttttctgttaaaaattagtcatcaataaagttagatgttttacaactataatataattacaaaaattagaatgttaaacaaaatagtttgttgagaatcttgtctttttctcctttttttaatagtaaatttcttcaccaaagagagtttagttattttaattgagactttttatagcataatggactaattttattaacaagtttcttttacataacaaaaataaaaataaaaattggagccatgcaaaatcttattcaaatattttgacaaatattacctaaattaatcactcgaagattcttctccatctaaacacataagatcaacatatttttttattattgaaactcctgatcattatgggggtgtgattaaagttattgaacgatgatgaggaggaagtagattcttaaattgagactggaaccaagggatcctaatcatcgttctcatcttctttctgaaaagattatgctctggcttttgaccattgaccgagaggcacgtgcaccgcatcctccttttcattcaaaatgcagaaacgatgatttcggcgacgcacgtgcactcccttgtcccgacatacactaacataatcatgccttaactctcacctatgcattatttatttcttccttgtttttttttttttaatctgctttgaatatatcccctttaccccttaatttaatcccacggttaattttaatgtaaagccacgttaatggtatcatataaattcaagtggtacccaccatgcacgtgacaatgcctagactctataacttgaatttaaagctttttttaacctcaatggcagaagcaagtagtaatttattatgacaattgatgagtatcacagttgttgcttactcgacaccgccatttaacatgcaaggattaaaaaaaagaaaagtgagcatggttttggtcgataataaaatagtttaatctactgattatgataagttaatattaatttacctttttaatgcttcgatttgtataagaaatttatttttgagttctcatgatttaagaactaaatttctattatgtttttctaaaatttaaaaagatttgactttctcgactctgttttccccctagtttttgttgttgtgtaggttgtccacagcccacagggtctcccttagatcgaaaataaataaaaatatatatttcaactttatttttctaaagatcaaagtagatgtctatgtttttaaaaaataatactacatatgaagaaccataaacatgggaaagaaacagcatgacattgattatatatagtcacgttttaaacgggagaagagagactgaggtcatacatagagaagagaaaaaaatacagataataataaaatatttctttagctaaagagaaaaggaaaatgaaatgaacagaaaaaataaattttaaaaacaaaaatttaaatttcttttccttcgattttttcaatccaactttaaagtttttttttctcccttattttctttcttctaaatcaaatagaaaacatgtctttaagaaaagaaaaagttatgtcacacgtatttcttccataaaattttctctcgaaaaagaaattgaaaataaactcgacaaaggtaaaaataggataggtgtcttactttaattaagtagacctaacttatttctcaaaagtttgagtttaacttaattatttaaaacatctgatacctttcgtaaatcttaatttaattaacctttccaaatgtttgatccagcttaatagtttatttaatagtctgacctgatgccttgaaggctctttaaataatctaaagtatatatttttcagctaagtagacttttaaaaaagatatttacttaatttgttcagtaaattaatttaagtcagattaagtgttcttctctgatctattcataatgatagattttcaaataaatgaatatatgctcatggtaattatgtatgtttagccatgtcttcactttttttatttaatacatcgtagatactgggactcatatatatttataagattttggttattttaaattctcaatattagacttgcaatttatggcatggtattgtaatgtaattcctaagttatgaagctttttctcgcacagtaggggagaagggacacatatcttagagatttaactgactcatttcttgatacagttttgttaatgactaaaaattaagataaaaaattattcaacagtatagcattcatattttgaatgcacctttctataattcttaataaacttttaatttatcaatctcttaatcattattccgaggtaataattagtagatccgatgggaatgtggcacaactgggctttatatgagtcttataagatgttgtcattaataattactcattataaggttaagacttaaaagacatgaagcataaaaaaaataattaagaggcatttgttgggtcgattgtagaccgaccttattgctgcccaagctcagtcacttgggccgggtatcattgtggcactataataagctttacacatttccatttacaatatgacgagaaaagattatttgtgttctaacttctaagttaaaaaataaaattaattgtttaggaaattattattgcaaattacaaaatgcttcgaatttgttttagttttgttataaaaagcataaactatttaagattgaatatatatcagttttaaaaggttattatatttactatttatttactttactttattgtttagcaatgtcaacggtatatatatacaaaaaataatgctattttaagaaatatataatccgcaaccacaagaagtatccgaccatgtaaaagtaaaggtgtacaagtgttgtgagctaatttatccatctaagggtgtgcaaaaaaattgggtgagttcgaaccggattgcaactaaccccgacccaaaccagttgcacactccaatagggttgaaaaaaaccaccccattttgtagccggtttaatttgacctaacccgtttcgataaaaaagtaatgacctaagctgcactgtgcactcttaagactaatgccctatcacactctggtttcgagttctgcccgccatcattctactatcattttgctgtgcagcttcaactgtcaagtttcaaggacgacaactaaggtttctacttctcaatttatttctatttcttttttcttttgttatgatttatcaacatggttatacttatcattctgacttccccttacatgttaggttttcaactactttgaaaaattgaaatttgttgtggcgttaacgattatattgaaggaacaacctacatctttatggttggtttcatgatgttgaccatgtttttttctattctagagtatgctcataagggatagctttacaaggagttgagaaaaaaagggtcatctcactgagaagcaagctgcctcagtaatccttttttccaagtgtgttatgtttttagtaaattttgtgaccttctgtaaagaagaagatatcacaaaaatggtaacaaagattctcaatgaactttgaaagactaaaaataagaagggcaaagtagagtatttaatagtagggccaatttgcaagtgctatattcaatcatcttaaagattgttatctattacagtattactttgggtaaaaatggtgatcttaaggtatgtgatatttgatcttttttaattatctggacaatggaagaccactttcatgacattttaccgtgtaagaattatcagcttaacattttgttaaaaatgttgacttgttacagagctagctatctcatgtattgaaggaccatctccaacgcaaggaaaaagtgtgtcaatgtttccccatttcattgtattttgagctttattccattatctattttggcaaaactgacaactatagagtgcattgtgtttaatctttatgcaaaaatatttttttataactaaaaaaattcattaaaaaggtcctctatataatctgacgttgagatcctaaatctataggccaaacaaaccctaaatccatcttattcatttggtcagaggttgagatcatagatttaaatccatatgttagggttaattaaggtcatagatttaaatcttaataccatcacaaacaaatctgatctgattgacaacattgaagtttagtgttacaatgtgaagattagtcttgtagatgacagttgacagataacctcaccaaagtaaagtttgttgcatttgtgttacaaatgcaatagctttattgtctaaatctagttatgcccagaaacttctaacaaactttaacaaaagcttatggaaaaatcatagtttcacaccctttggatacaaaaagggaatttaagtttgaaataaaataatataataactctaaattatagtacatcaattcaaagttaattgcaaatttctttgttaaaagtagctattaatgccattttttaaaagtacctattaatggcattttaatattttatgcaagagaattccaatccataattggatttgggctttttgttgctagcgtaaatgaaaaaaggttattaattatgatgaagtaaggataatcctcgtaatgaataaatattcctaggccacatgtatacataatcatgatttaaggccacacaatgaggaaataatggagttaaattagttcccacaacatcctctaagaaatttacttgccttcatcaaccttcttctgtcctttggctgaaacaaaatttgttaatagtttcaactttcaagcttcgcgatatcaccaaagagtgaacagagcaaacaatattcaaatttacccactttttcttctcattttttttagcagcttctgccctttgttggcatataagagctaaatgttctacatgcaaggaaatataacttacttgttgtgtttttccttgctcttgtagcctcatatagcgctcatgagctttctgtttctcaagctcctctctgaaaacaagtggaaattttaaagatattagaaaaacctattattgtagaagtttcatttcaatataatgtcaatttataagtgaagaaataagatgaaaaagaatacatggaactcctttaactataagcaacactttcttcaggtgtgtgattatcacaataaacaatacacaaaagaaacaaatcataccaatgattataaaatactactagtagtttcatcttctgatttatccctaaatcaaataccttctcttcatgttaacttctctctaacaaggttgcacaaaacaatgtcaccccatttgtttatgtatttttatatgttgatgttgatttgcttggatcaattttaatgttgagaaagctaaaccatttacagaacacattgtgactaggacaaatatgactgacccaacataagctccccctttgactaggtaacaccctactccaaggcctagttgctgcatttttaggcaaaacttttaacatttttttccatttaagataagcgagttttcactataattaaggcatgattgtattcactttcaatttgaatatcttcttaagcttgtgttattataattctatatcaattattggtcttcttaagctaagataagtgaccttaacatttttatcagctaagatttatatacttatgttgttttcaagtgcaaaatcactagatggatgaccatgaagacattgacatcttggcctctagcacagttagcaagagaaatgttattgcctcgctccgtaggatgtaaaaatcaatatactgcatgggatcactttgataaattgccacaccccaatcctttatcccaagctaaatgtcgacattatggtgctttgatcaaatatagtagtggaacaactgtcatgcacactcatttagacagaagcatgttaggtgtttggcaagtgtaccaaatgttcaagtaataaaatctcgaaagtccgggtgttgaattccacaaggattttatgttgtacttatcttggatacttttcaatttataagtgaagaattattagagaaaaggataaatgaaagaataggaaacgattaaaaggagtaataaaaaacaagaaaattaaagcataataattaaggaaggaaattcaataaaatgtgaatgttaagacttagcatgccttgtttgcctaggatgtatgaatttatggtttttctttatcattttaactggatctatcctacccacatctatccatctacttgcccctgatgcttcacgatgacaagtctattttatttacctatctcccaaatgcctttgaaaatactcagtaaataaaatgcatgaataataaattcgagatatttgttaaatgcatggacataaagttaccattctgtgtccagcaatgatttccttatgatatcttttatttattgttctattagaagttaccatctcccaagcatctaacctctaaaactaatgtctgcatcttttctttaaatcttattagaagttaccctctcccgagcatctaacccccaaaagaatgtaaagatgaaaatgcaagataaaatagaaaagagaatagaatagaaaaaacctggaaaggaatccttttgcattgataaatctaaagtacaccatacatcacttggctttttaggcctgtctggccctaactaggggattatccactcatgaccatgagggctttacaatgaaaggaatgaaagaaagaaatacaaatgataagagaaaggagaggaagagttctcagactttaggtagtagtgggagtgctctgagacacagtgtcgttccccttggactagctcttatttatagctactgaagtgggctttgggccttcgtaggctcgctcagcgtgacctctctcgcttagcgcttggtgcttctgttggatcgcgcgcttagcgggctcctctcgcttagcgggttctgttttctgttgcgcgctaagcgcgagttctgactttcgtgcttaacgtctctcttagcacctatgtctcctgtctcgcttagcacgaggtacgcgctaagcgagatgctgggttgggccatttctgatttcttcttcgttatttcccactttttgcttataacaccaccagtttttatatctacagctaaaattcaacgaaacatcaattctttaacatttaagtgcaaataactgctaaataattatttttaaagacaattttactttattttctattatcaaagtataattatttagccactatcaaagcaataagaaatcagacatcatgagcaagaagcaaaaatcaaattcttcttcaacgaccattactccttcttcctcttccatgattgaccaagaagcatgtcagattgcactggtgaaattgtttgtggcattgaagctctttttccatacagttgagcatgaagcctttcgagaattttttagcattatagcaccttttcgtgttatcgtctcgtgcactaccttgacacgagatgttcttagtctttggagtagtgagaaagtaaaattgaagagcttttttctcaagattgttaaagggtttgcctcactgcagacacatggacttcttcacaaaatctgacttatatgagtttgacaacaaattttattgaaaatggatggatattgcagaagaaagtgagaaacttttttcaagtcaaaagtcacacggggaagaatttggctaggatgattaagagttgcttaagtagttaaggcctaacctgtgttctttcattgacaattgacaatgctacctcaaatgataaagcaattgaatatatgcaaaagaggctaatgtcttggaatcgtttggtgttgaatgaaaattatcttcacatgtgatgttgtgcacatattattaatttaattgtgcaagaaggtttcaaagaggatattgcaactatttgtagggttcgtgttgctatcaagtatgtaaaatcctccccttctagattgtctaaattcaaggaatgtgttgcacaagtaaacattgaatataaaggccttgtttgcttatatgtagaaactagatggaattctacttacttgatgttagaagcctctttaaagcatcacaaggcatttgaggagttcaaattgagagacaaaaaattcatgggctcggctcctacatattgtgattgggaatttgtgcgttcaatcttgccattctttgagattttctatgatgctactttacgcatttctggttcatcttatttggcaagaactatgtatatgtttgaggcctttgggataggaatgaaaatcaggaaaatgtctacttctaggggtgtgaatataagtgtaagaacgacggttctaggcataaggaaaaatatgataagtattggggcaatcttgatcgtataaacatgttattgacggtctctcgtgttgcacccgagttacaaattaaaattcacgatttggcttattgctgaaagttttggtggtgaagggggtgaattgacttataagttgagggataaaatggaatctagctttagatcattgtttgaagaatatagtagtggtggtgatgagtttaaagttagctcacaggaggctcgagctcgacctagtgaaagggatgagaatgatccttatggctatagtcgatatttccaatcaactatatctagtacatctgaatgagatatatacctggaggatgctagagatagtcgactggatttggatgttttgaattggtggaagctgaactcaagccgattcccaacttttccaagcattgcaagagatgtgcttgctatacctatctctatttggaccttttgatttggatcatcactgttattgaactattggaaatgtcaactttgctttcaaaattcttttgggtgatattaggatggaaatgtcaagtgactgcttggtttaatttagttctaactccaataaagtttatctggttttgtaatctgaatctagtatctttatatttagctctattctaatatatttgtataactcatttccttttgaagatatatttttgaagactttcaatagaaagtaataatcaatatggtgacttggcaaatttggttattccttcatgcagggctgttaaggtgtggcaaaagttgcaggctcaagtggacaaattatctgaggccagacttcaagagaggccttctatcagaacatgaaggccttgcaatcatttcaatctcttgatgctaacatatataggtctgctacctccttaattctattttggtggcttgagtagttctttcaggtttcaatggtttggatgatgcagattttgtggtagaagaagtatgattctgaaagcaaataattattcttgtatgtataggtgtgaactgcctaaacttcaatttttaaactttgaagttgccctattgctagacttatctttttctatacttaaatgttgttttgattttgactcatcattgatatattcgtactgataatgaatttctctatttaaaaagacaaatctttagcagcttcaagttttttgtcaacctgattatactttggcttgttattctgtgccaagatagaacattgattgtcttggtatttacgggtgagaaagagttccatttctactcaactttgattttgaatagatacaagtctcaatcattgctattgtgacaataaactcatataaaatcaactatgtaatatataaaccacgggagcctgctagtgttgttcttgaaagctagctgattaggtctttaaaatgatgtgctcaaatctgcatgtgttgcatctattgtttctcaaatctcaatagtaaatattttaattgatatgctctttttgatcctgtattagttgtatttgtaagtttgtattcttaactatattacactcctgaaattcttgtaacttgcaagtcatttcttctatgtggcatttttaagaagctacatagcttctttccatcctttatgtgcaagggaagctagacataggatggaggtttggacaaagtatggtaacgataatgtgagtaatctgtatttttctgggcaaagttactttgctaattcaaaaaaataaaatttgaaaaccaattcaaaaccaattcaactcttaaaacaatttaaaactagtttgaaactaatttagaatcggttcagctctaaaaacaattataaattggttcgaaagaagttcagtttagaatcgattcaagaccaattcaacacttgttttctaaaaccagtttgcagatttgggttaaaaaccaaattggttaaactatttcgaaaaccagtttgatttggttttttttaaccaatttttacacagccctaactccattccattaagaatgaggtaggcaacttcaaacatgaccgttgaaagggtattgctattggcactataatttttattattagcactattcatatgggtgtcttttggttgtatttccaaattgccccttggatgaagcacaatgaaaacgtgtttttgttgcacatttggaaatttacaaaacaaaatcatatttgctttgtagatttgttcaatggaattgtattttccattatacaccctaggggtgaaaaataaaaaataacgaaagtatgacttcgttgtacaacaataaaatcatatttcctttgttggccctgcaacccctcaccgccttcctaaccttagatcaaaccaaatccaacacttcattcccttcctccccccctctcaaacccattgaccccttaacaagatagattcaagataactaaccccaaacccttaaacccctcaacacagattcgaaaatggatgacacgatggtggatgggattacgcgtgcggagccttgaagttggggtcaagcatgcgcaatggcaatgttgtggtcacacacgtagggcctcagatttggggcaaaggtagggcgggggagggtggcgcaatcttgtgacaatgtgaggggttgttgatctgggttggggtgagggagatggttttggatctgaggagaaaggaaggggatgcacggatttgctgagttgataaaatagagatttcacaagattggtaatgttaatagcaaaatctgatagtggaaatagttgtttcttcccctttaacattgtaatgcaatgcagcacttgtccacttcattggacattaactaatgggctttgttattctcataccatttcctatgttcaccttaatcttttcattttttttacaagaatacctatgatggaaaccttttttatttgtatatatctcgacaagatttatgagatgcaaaatagagacacatttctattatgatttttcaagacatttaacaaaaacatatttccggtaaaggtatttttatcatgtttttgaaatggttggaaacaaacttagaaatcagagctgtgggaatagcaaggcacttaaaaaatagccctcgtcaaagaaccagcaaggcacttgtcatgttttggttgtagacagggcaattacttctcgcaccccaaaaattgcttccacaccttttcagaatttttttttaccttatgcattggtcaattcaaaatgtaaaaggtgtaaccaatcacgaatgtaaagaaccaatttggattagccaatccgaaagacaaaaaaaaaaggttgcagaaagcaatggcatgtgtcttgttgggttttcatgtcatgggtattagaccgtgtccacgcatgttatatgccttcttagaaaacgagacaagtctatgattttcagagtatctgtactgtactctactctccctttacaaaagaaagcaaaagaaacaagaaagaaaattcaaataattgattcaaagaaatattaaggcttgattacctaataaaaaaaatggtggtatttttattttaattctagaaaacgtgtatacctcacaataatttatgcaagcaataattttgaagtcacttgataagacatgaaaatgatttttttatttaagtgttattttaagtaaaaacaaataaataaaagcgatagagataaaataaacgagtaatttaaatcttatattgtacatgacaatccatattagcaaacaaaaaatgagaattgtacggcttatatatgataagtttattgatttttaaaataattttttaaaaataatttaaacaataatttataatgaggtgatttataattagatgaaaatgttaaactatttttacactgtgagttatacatattagttaatcacacgtatttatgaagttagtaatttcaaagagtttattattatcataatccagaaaagaacaaaagtgaattctaggtagagggtggacccgttgaaattacggttgatatgcaagcaaatggcaaagaagatgatacatacactacgaccccagcaccatttgtcaatcatcacacgccatacacaaaagtccaaacctggccctccccttcaactcttcccttggaagtcccgattaaagcactaatacaatagtctttaaaccaaacacttgtgaaagtcccaaaagaaagctttgaaaattctcatacacaaaccttttctttattccttctacagtgttaaagtctctatcaacacaattcataacttgttaccttatcataggtgtgtactgtgacatgggttgtttcactagaattcatcttgcttcttgttgctgatagggagttgaagtttttatagctcggaacaatcaaatggatgcaatccaaaccgagaaaatctatgttgctgttgggaatgatgtgcaggatggatataagactttgaattgggctctcaagaagtggaattctcatccaatttccattgttattctccatctcacacacaatagtaccaaggattatgtccatacaccatgtaagttggagttatgtatcagctttaattttttttagcattgaaattcaattgggtttagcttagttttgtgattttgtggcagttgggaaacttccagcaagatctgtgagtgaggagaaactacaaattctcaggaaagatgagcaggataaaatcaacaagctgctttccaagtatattgctttctgtggaaaggtaagtgtgtgttcattttagtacttcaatagtagtgttcaattactcagatcaaatgaagtgaaatgagcttatagtgatgtagtataattcctgaagcattggtttttaatcgtgctgaatgttatcgtgtgatccgtgcaactgacatcacaataaggcttagttgttgttttactcagatcatatgaaatgaagttataatggtttagtctaactctagtcttctgtttgtgcatattacaggtgccagcagagattcttgaagttgagaaatttgatgaacctatgcaaaagcgcgtcatagacttgatctttggtctaggaataaccaaattggtcatgggattttcattcatgaagccctccatgtactctttcattcatttccttgctctttttcttctagaatttttttaagccatgctaaattttctattattttccttaatacatttttttttatcatgggtcaggaaatctaaaggtgctattaatggattgttccatgttcatgagcaaaagccttctttctgtgaattgttcgttatttgtggagggaaacaagttttcttaagagggaagaatgatgagaaaatcatggaggatgatcagggggtcatggttgcaagaatgagagataagataactttcaaagattggttagacaagtggttcaaagacaaaaccaacgattcacaagatagaattgcatcactttcctcaagcaatttggagtcccctgtaaaccgaaaccagtgggaattttacctccaggaaattgaaaattactatcaagaattgttgtcttcgaagccggaggaaggaagctgcgtgcaagaaaatgacgactcacagattggaccaattgagccacatgtcactgaacagaacaattataatatggtaactataacaatgacggatatttttctcaaatatgtggccttgattaatgctaatatttatcttctttgttccctttcgttttgtttcttctagggagttgttagatgattggtttcacttttacatatatgcataatacaatttgtttttattgtacactgttgaaaaagaaggcgtctgtttgtgaaagtctaaatttgatatgtaatatctttctttaaagaattcttactttgactcttgttagtatttgataagtatatattgtaatataaattgagggtacccttttttaaacttttggtcggtttagtttgcaagatatgaaagctattttcaaatgttgatcttgctctaaagccatgattagctttctatgtgtgcttttggacccaaaaacaaaaagttgttaaatagtagacgtttgacaatatagtcacatactttatatgtgcctttgatcctttgttatttcacattatgtgcatggtgtattgatttgtcaaaaatattgcctaactttgtctcctcctactcagagtactgcggaaaaaattgagatcctgaaaaataagcttaatgaaggtcagaagaccatccaattgaagaggaaagaagccaaggataacatagagaggcatactaaagctgaatgggcaatttgtttatgcaacagtcgggtaatattctaaatcagtttaacttggtgacacaaatgcaaaatttttcctctctctgtttttaataaatagtcaaatcaataaatgaaagatacaacattggccacattaagcctggaataataaaaattacatttatggtgagccttgaatatatatcaacatgagattattcatatttaatcagttatatcgaatctgagccttgaatatataattttgtgaaaaattaggaaaaagatacataatgactttatctaaacttgaattactctctttgtttctaattataaaatcttttctaaaaattactttattcctttttataagatgcattaagtattttttcttatatatccttaattattctttcttcaaacattaataaaaaataattaactaaataaaaaaaaaattttaaataatgatacaaataattaaaagatttaatgtgattaagtaaattaactaattttttgttaagacacataaattagttaaaaaattcttataattaaatatgaaagtattatacaaaagttaagcatagtagcaacaaaaaattaaaattacaactaaattttatccttagtattaattttttattttacattcaaagaccacaaacataattttccttgtctagggattaatttgagcgtttgactaactataccttctagggattgatttatccctctttttttcttgcttgcatgtcatatacacgtaaattctcatctgttaatggctacttgttaggccgaagaactagaaagtcgaatacgtgaagaggtgagtgcaagagaggagctaaagaaggaatcagacgcagagaaggagcaaacagaggagatgagaacggaggtggaagagaggaagaggaggctgagctcgctcacggaagtccaatcggagctctcaaaccggctccaaatatggacgttagcgaagattcgggcggagacgcagctggagaaggcggtgggggagaggagggagatggggagggagatagaggagctgaggcggcagagggatgtgctcaacagaaggatcgagttctgcaagcagaaggacgccatcggaatggccgcgaggctcgccgagacaacgttctgtgcgttcagggagtacaccgaggaggagctccggttggcgacggataacttctccgagcgcctcaggttgaagtccggcggggattggaccaatgtgtataggggacgctttaaccattccactgttgctatcaagatgctgccttctttgtcaccccaacatttccaatccaaggtacaaatataagtatttcacatcaatttcttttctttgattgtgttaatctttaatgtattttttttattagaggaattactaaatgaagctctaattctagttgaaaaacaatatcaaaaatagttatgaaatgtaatcttctgtggggtttaataatatgctactcatttgtggtattaatagaatattcaaatcaattgaattaatagacacgataggttaaaaaagtgaaaagtatttgttgggtgtcctataaattcccccaattcaattcaaatattgaactaattgtgtctgacccatgatgacatatgttcaatgatcatgttaattttgtttccaaaatttcttgttatatagaattttcaaatagttttttcctcgaaataattataaaattctgtctcagcttgaatttactaatttacaccgcatatttcaggtgaggcttcttggtgatattaggcaacctcatctggttgccatggttggcttttgctccgagcccaaatgcatagttttggaatacatgcgcaatggaagcttacgagacatgctgttttctaggagaagaaaccgaaccttacgatggcatgaccgaatacgaatagccacagaagtttgttcgggcctgggctttctcaatgtagctgagccaaggcccgctattcattgtcatttgaccccatcgaaaatcctcctagaccgccatttgattgcaaagatcacgggctttgggctccatgaatgccatgatgaacattgtaatattgagtcagatttgcgggccataggggctttgttaatgcaccttctaactggaagaaattgggctgggctcgttgaggaggtgatgacggtagatatagatagagaggctttgggtggtgttcttgatgagatggctggacaatggccattggatctagcaagggaacttgcgggcctggctatgaggtgcatgtccatcaaaagcgagcccaacttggaattgagcattgcaagggttttagaggaactcaatgagataagaagaaagggggatgaaattgttggaagggaaaggcgaaagacaaacattaatggtggatgtataaatagagagggatccagtgatgtgcctagtgttttcctttgtcccatacttcaggttaccctcttgatcttttaattttttttaatgagttagaccatgttataagcttcttcatgagtatttataagataagaaaataagaagataaaatataatacaatattaaactttcttactaaaattaaccctttacttttagagaagttaaataaataaataaataaatctataaaagttaggtgcattagttgattttactttataaaaatttaatttattttaatttctcattttcttctcctacaagtagctaagtatttctcctagctagctaaatagtatgatttttcctttatttatttgtaatgtctgtgatatgttgcaagtttcatgactaatcctgataaaattcgaaaaagccactagccaagagatatcaagaatgatcatatgttgagtcctgcacataatgtttgaacggacaggcaaaagtggagttgcattttatgtttgctaataatccttgaacttaaggttgtgttcttgtgttgttggctctgcatgcaggaggtaatgaaaaacccacacgtggcagcagatggattttcttatgagctagaagcaatagaacattggctgcaatcgggacgtgacacatcaccagtgacaaatttgaggctgaagcacactttcctcacccctaatcatacccttcgttccctaattgaggactggcagaccaacaaatcaacctgagttagcttcggattgaaatactaacaacacgctctttaatacacttgttacttaaacaataaccagttgagttaatgattcatgggcaggttcaagtctaaaatctttctaacttaccattctttgttttgataattcctcctacaacaattaacaggttggtttggattaagttcacaattcgatcaaaaatttaaatgagttagtttagatcgattttaaaaaaaaaatgaaactcaacctaaattaatccgtttgtaaacgatttggattgggttgaatcgaaaggttaaaacatttaattttatttatttttttaaatgaaatattttttataaactaaattttttattaaatgaaatacattatacattacttataattattaagtgtagtcaaatagtttaaaaaatcataggaggaatcatattatcgtcaatttgtcatcatcatcacatagagtaacattatgttaaatttggtttaaaaattaaaatataataaacaaataccacactcataaaacctaaaaacccataaattaattgaaaatttcaatgttttcaaataatcaaatgagtaatgcaattaaaatttcgactaaaactaaaatagtttaaaacaaattaaaattaaaatagatctacaatcatctttgttgcaatagattttaaccaattacttatatattaataataataataataatttaatacaaattaactggtcaatgtatcgggtcagtgagtagtgggtctagatattcaaacccttgacctaatccaaaactcaatgggtttgatttgtatgatttgagtttgatctaaatacaaaaattattcaatccaaactgtttggattggtttggatcaattcgaatttaaagatgaccgccgtaacaacaactcttttcagtattaactcaataagtaagtgagtacacttttttttttttttcagcagacaattgacgtgtgaaacaactatcaactatgaaatttcgaagcataacaaatattctatagctatcagcctatcaccaatctaatgtcactatagttatattacacatccttgtataatttacctttgtcttcatgaactgcaacatcttccagtcccacggaagagaataaaggaataatggacatatcctgggagtggcctttttcttgaaggaatgttaccaggattaaaatgtgagagtgaaccaagcattagactcccaagcatttgaaacgacaacaacaccgggctactttctttggcagcgaatattcggattgttgtgagggatcagtggcaatgtcttctgctcgcgaccattggtacacccctcgttcttcttgactgccagggacagtgttgtccagtaggaatgccaccaacagtgtaaccaccatgttcaaggacataagagcattgattgcaaaatcaagcttgaacatagaaaatataattcatattcatcagaagaggaaataagttataatagctgaatttacaagaaaatcaagcaaaagtaaagatttgtcattaaggacaaatttacatgataccagtttcaatcaggataaatccgttaggatgttagaggcttgtgaattaaatccgttagtatgggcatattcatctataagttatacagccaatctttcttttgtttgttccttttttttacattttagggcaaaaggtacttacttgctttatgcctgaacggaatggcccacttgatgctgctgctgcataaggaaccagataactgggcagtaccagacttgattcagcttggtattgttgaaaataagcagggatagacatgccaaggaacagtgaaactccaactattgttatgttcctgaagctggcagattgactatactgtaaattagagaggcccaatgctgcagtaagagcccacatgaaacatagtacagaagcagccaaggccagtggaatggaagcaagaagggcacccacttttcctacaaaataaagcatcagagatcggacaaaacaacaaaatagcctgtgtacatacaatctatcttatattaacagtcatattttgagactctaatgaaccaaaatgaaaccactgcacatccttagatccatctcagccagaatgatggagaggaatgaaaacatattaagttggacaagactatagaattcaattatggattttttctccaagtgttgttattttacctataaatgagaacatgatcaagaaagctgctccaactaccactaccttccgacttgccacctttgttacgtcaattgtgtgcatgttttctgtcaaggttgttgccccagtaccagaaccccaaagaccagccaatatactacagaaaccctcaagagcaattcctcggctcacaactccgggagttggaggcctcgaattaacttgcagagatgtagcacgataagttccaacctgatagtcacaattacataaggtttcatctcctatttaatatttaggtttttcaacatgacaattcatcttaatgaaccttgacaataatcatgcctttcaagtctaagaaaatcaatcatattcagaagccagggaccttcagttttgcctaaacccatataaattaggatagttctgtgtgtgggtgtgcatgtgaaccactttcttcaatttaagaaatatatctttaacacattagtgaagattttgctacctccaatttgaatttcagtctaaaacagaagataatttggaattgcgagcatttaaatatgatacttactgaatccacagaggcaaccagtgacactatgaccatgattatggaagtcctaaaatggaaaatagggataccccactgtaaagggtatggcattctgacccatgcagcagtagacaatgcattggaaacatcagtcctgcaatgcttcatggtatatgcatgttttctacatgcatccaacaaaatgtttgaacttggtatatctggattgcatcctttgtaattatatgctccaccagctgttaaaaaggacgcatagatccaaattatagtcaaactcaagggaacctgaaaatattaaaaatgttataagaatttattattaaatagacacatgctaaaggaaagacttagtcaacactctccacagttactcacacgaaaaactataatgaaagcatagcatagctcatcaatatgaaaaatgaacaagtaacgtcttaatttaagacacttacagcataaattcgaaataagtggcgcccaaagatagatattcctcgaagatacttcaaacaagacaaaaagaagtaataatgagtttttgaacactgctgaaatcatttaatatataaaataaaaaaaataaaaaactgtttacaaaattcaacagaaagcctcaaacatacaagaagactttacaaattataatcattagaaagccttttctgatatcaaatatcctgtattaatttggtgctgcttgaaatgtaaaacatgacacaccagagtgaatattagaactagcgctatctgtggaatagtaatttctgggcaagtgcctgcttgtggaaatccatagctgaagaatgctaaacctacagcagcaacagttggggcaaccacaattgggttgattaacctaaaagtgtaaagaattaacagattagactcaagtgtttacaatcctcattagataaaagttcattagcttctatgacttcattgctctatgcagatgtttatttcgtgtgttaatgcttagccatcgtaaatgtttagaaaggcaacagagcagcaaactacaaaaattttctaaattgaacacaatacaaaagatatttacggacatatgatatggcaagtaaattcttacctcagtagaatagacattaaaccactaaatcccaggatacattggaatactgaacctacaattatagctccttggagttccctcattatgtgtctaaatttctgcaaataaaatatacaggctttaatgagaatatatccaaactaacagaataaaacccaaagtttaatgtaatttatgaataacaggtccatgttctgttagtgttgacaaaaactggcaatgcagaaatctattaagagttaacagatacacaatagcagaaaggataaaggaaaattatgctgtggtgattcaaatatgtataatttaaaacattgcaagccatgtgaaaattaactcctaactatattttctgaagtaattgtatttcaaaatgcagatagtttacagatttagattacttgatataattttgtatgactaaactgaaagagcctaaagtgatgtgttaatgaattaacattttgtgtctgccaattaagtaatgagcttacatgttcggtaagattccgatattcttgggcatttatgataactaatgcaggtgctaaatacacaaatgagctcccttgaactaaaggcagtcgagtaccaaggtaggagtgcagaatagtcgtgatgccagaaagaaacagcattgtagaaattacggtagcagtatccttctgtcatcagcaattaatgtaaaagtgaatagacaagaatatgaaaaactatcgattttcttagagtaacaggtagcaaacagtaaataacagcatatgcttacatctgttccacccatgacaggtatcatgactaatgggatcaatacaagagaaccagccaatgatagatagtgctgcaggccataatagataagagatactgcaattagaaatgccagtatgtaagtaaaaacgaggtaataataatttggcaagttacagcaacatgactatgtaagcaccccatcttgttagttacagccataacttttggcctagttgtatccaacagatctgaagactgatattctaagataaagatcatgtttataagggggaggggcatggaatttagctttccatgcctgcgtaaataattctataaattcctataaattgtagacattctttctcgctctctctctcccctaatttttttcacattcatattctctcatctatggaagggatcttcaatcagtcatggaaaagaacagtagcaactagagattaaagaagttgatagcattcaagccaaaatccaatgcaaataacactcataccatcctccctatttttaaacaagatagtactcatcacccacagaccaattcacgaagatataaatgaacctactaacaagcttcagaacatccaaacataggaagtagtaagcaacataccattcaggcattcacattgctgaacatacagcattatccagctcaaaaattataaagataaaaaaaacacactccctagagacatgaatttttccacacgcattcaagtccaaccataaaattttcaaaccatccaaaactagcattctaaaacatagactgacaaaaaaaaccaaacaaatcaagtgtgaaaaagaagaacacaaactaaccaatccccggattttctttgagcccgcacttcaatcccaacggtccctgccaccctccatcaccaacctcctccccttctggaaacacattgaccttaacatccccatttccctcctccccctccttttcctcattcacaggagcaactgcagacactccatgcccattcccattcccattgaaaccaactttcctctcaccaccctcattctccttctctttcctccccctcccatccaaaacagcaccattctcacccctcgttgcacctccatgagactctggtacgatctcgttttgcctcgctcttcccaccaccggatctatctctatcttcggagatgacccttctcttctcctctctaaagcttcaaactttgcactcccacttgtccctgcttcccccgagtaatcagaaacaaaacccgttcttttcgcccacgaccgtaactctcgcgggttgtgctcacttctcggcacaaaagagtccactttgcctgctacaccaccctgctgtttcttcttcccagtgccacccctcacactcatcgccacgtttctgttcagtgattctgatttcgacccagtttccattgtcactgatgaactctacccaattcggtataaagaagaaagatgagatttttggaggcacagtagaagtaaaatggtgtgaaaacgaagaagggagttcagtgtgaaacagttgatagcgacggtggaacgaaggagggagtggaatttaccgaaacgtccctatagaatgaccgttgataaaggaagtgttaagtgtagtgtaatgtagcagctgaatgagcgaagaaggtaccaaccagccaagccaaacttgtttccattttctctctctcttttgggcccttgaatcagacaaattctgttttgttgaatgtgcgtcattttttttattcggtgggaatgatgagatttatttacaatgttttggctctttgcttctggttcaagtaatcttctgctgctttaaccaattgcaagctcaaggagtggagttgttcacttcaattgattagcacatgaacacgatgatggtgacgtgatgcaaagaacagagctaaatcggtccaatcccaagtttactcacggcgatgataattacttaatttctgttaaaaaaaattgcattttacaacgtaacattatatatatcgttcaaataaaataattaattaataaggttggatttaaatataaaaaaatcatttttatatgatccaagattgacacttttcatgcatatattacttttttaccttgagattatgtttgttcaaaggtttctaaagtaattcaagttgttgagtgtaatatttattgtgtgtaagtagttcaagttggtgaaaaaagtaatggttgataatttttaaagttgttaacaattgttctaattaataagaaattaattcatattttatataaagaataaaattgattcttttggttaatttgaagactttattgtcgtattcatattttttcttacaacttttttagattaaaaattgcaaaatttgggaaagtgggaatctataaattgtcgtccgtgatcaaactttgtacaacaattctcattctcattcttaatttctcaatctcaatttcaatttttgtttctttcatgctaaatggatactcgtatttaatttgtacctttcttgcaattacaatttcatgtaaatttatccttcttctccttttagttaaaatcctccattttcccccatttttcttccacaaccaccaaataacccaacaatgaattttatgctttccaatgtttccgcaaccaccaaaaaacccaataataataaattttatgcaaaattatcaacttctttctaccaaaagctctagaaaatttcctatatctctactatcaccaaacaactctgccatgttttgtgttttctcaaattttagtagcggtgtataattcactaatgcgaaagttgaaacacaagtttcacaattttttattttactaaaactggcctaaaaaaacattacactttatccttatgaaggacagaattgcagtaaaaacattaccatttggattagaaatttcaaaatttaaaggaatttgaaatgttcaaaatttgaattatttttattttaattttttttatttttcaaaagtttaaataaattaattcaaatttcttttattttaaattcattgtttagataggataattcaattttctctatatgtaaaattttaattttatattttaaatagatgaaatgttaatattgaactttatagaaaataaacacaatctaattttgaaatattaattaaaaaatattttcaatttttaataatttataaatacaaaatattgataattttaactagggttgttttgcatgatcacaaccagtgatgtttttaaaccgacatcaaccaagactatttttcggtcgacatcaaatagggtttttttgtcaaagtatgtcgggaatatttgttagttgagatcagtcaggactattttttggctaacgttggttgagtctatttttcagccgatgttggttaaatttttttaccaacatcagctagggtttgtttggccaacaccggctaaggtcttttctgttagacaaatggcctcagttatcttaagaagggggggttgaattaagataacaagaactattccccaatttaaaatttcgctatctctttttagattaacaatgcacccttaacatgaattactcaaaagacaattcagaataaacttctttaaaggcaaaagataaatagcaataaataaaagaagtttaagggaagagagaaatgcaaacttgatttatactggttcggtcacttcttgtgcctacgtccagtcctcaagcaacccgcttgagagtttcactatcttgtaaattctttttacaagttctaaacacacaaggacaactcttcctttgtgtttagaattctttcacaacaaaagactctcggtctcttaatccttttttagaagtaaaaagaaaagaagaagaaatctctcttgaaagagatagattgtacaatgaagatcaatcacaattccttatttgaatatgcaagtgtttgaccaaagaattctttgagaggataagacatttcaatttagaaaaactctcttaatcttttgagaggataaaactttttgggcaatcaaaaactctctccaaattcgtgtttccaagtcacatataaatagacctttgatggccattcataaaccatttgaatagatgtgactcttgaaagttattttctgaaaatctcatctggtaatcgattacaataattgtgtaatcgattacaggctttaatatttgaattaaaacgtttattaactgctggtaatcgattaccaatatggtgtaatcgattacagagtctaaaatttgaattcaaatatttagtagctgttgtaaaccatttttggccactggtaatcgattacatcctctagtaatcgattaccagagagtaaatctcttgaaaaacactttttaactcaaattacttggccaaacctttgctaaatcaattaggaattcccttcctaaaatactagtaatcatcttgatgttgcggcttgtattcttgaatcatttgcatcaaatcatcatgatcatcatcaaaacatcaaagtcatttgcttctacattttcgaacgacattgaccaatgttatttttagccaacgttggcctaaaaaatcctagcagacattaacaaaaaaatctatccaatatcaactaaaaaatagcttagtcgatgcagaccaatagaacctacctgatgtcggctgaaaaacatcattggtcaacgttggccgaaaactctctagtcgaagtttgctaaaaaatagctttgaccaatgtcggacaaaaaccttatccaacatcaattataaaatagccttgactgatattggctaaaaaatagttctgatcgatgtcgaccgaaaaaactctagtggatgtcgactgtaagaacctagtcgatgtcgagtaaaaataatcatgcccgatgttgatcaaaaatacctaattggtgttagcagaaaaaaccctagccaacatcaacaaaaaaacttagctaatgtagttaagaaatagctctggtctatgttagctaaaaaactatagtcaatgtcagtaaaaaaaattctaaccgacgtcgacaaagaaaatctagttgacataagtcaaaacaccctagctaacatcaactaaaaaataaccctagccaatattggctaaaaaataactttggctgatgttagctgaaaaaatctagctaatgtcggctaaaaaatcctaacaggtgtctactcaaaagttagtcatgaccgatgtcagtagaacaaatctagccaatatcagcaaaaaaaatcattggtcaacatcagctgaaaaaaccttgatgacaacggccaaaatttttttttgaccgacattagcaaaaatttcccatgattaacgtcagtgagaaaataactctgaccaacatcatctaaaaaaaatcttagccgatatcggtaaaaaatagttttggttgacatcatacaaaaaaattgatcgaaaaaatcttggccaacgtcagtgaaaaacaacttatgtcgatatcggcagtaaaaactttgatcacccgtagttgtgagtgttgagcgagaaagagtcgcgagcaaaaacatgagttagagtgagcatctccaaaaaaagaatttcaaattttatatttttagaaaatttgaaatctcactattttagtcaatcaaaatgattcataaaaatataaaaaattaaatcttttttcaaatactctatccaaataaattattttatcatgaatcattttaaattttttaaaaaaataaatttttctattaaatttgtccatccaaacacactataaaagtcaagtttataatggaagaagacttctcgttgaagcataactcaacattttgaaagatactattgtcaatgttgataagaaaacgaatgatttcatggttaaaagttaaagaaaattacaacaacttgcagctaaatctactaaaaaggggaaattgcacaacttaaagtttggtgctataaaatgaatgttattgtccaaaagttcataagtattacaagcaagctatccaaggaaagaaaaataggtgcccaaagaaagacgtcatggctaacacatgttatattttaataacaagccaactccactaagcgctgacataaaaaaaaaagattaaaatcatgaagaaagacataatcaattatttgatgactactctgaaaatttggtatatgcaaaggcataattccaatttaagttctaccatgaaaataaaaaatgatgaaagtccttaaatcatttgtgactcaaggacaaacaaaaaatgaaataggaatccaagatgagttataatattggagatgctttgagtttatacatgccccataatttacttttagtttttaaatatttttgtagcattttttatctctacatttttattaacatttttcttatcaatgttgttaagtattgttgttaagcattgatttaacaaccaagctagcatccacatgacttgctacatcatttattagtctaaggtaacaattatatatatttgtttttaataaattatatttttaccttatgaaaatatgagaaattataaacatattacatgtaaaaaaaaaactacgtataattatcatattaaattaattgatgtcatgacaaatcatgtatataccaatgataagcatcacattattccttaatgataatattaacctctgagacaaaaattgttaaaaggagaaaaatataaggaccaacaataatgtttttttaaggactaaaaataaattttgtaagaaattcagtaaaaaaaaaaaatatttaacgctatttgaaattaaaattaaaaacctatatatacttcctaatttttcattcattcacacataccctcgtaaaacctcgaagcttcaaagagggtttatgaagaaggaggttgtttcccgaacactatagaagtttgcagagtgagcaactgagcatatactgcatacgtaatggagttcccttcttcttcttcttcttcatcctccatcttctccccgagcccatcagacgacaccgttttctacgccatataccctgnnnnnnnnnnnnnnnnnnnnnnnnnnnnnnnnnnnnnnnnnnnnnnnnnnnnnnnnnnnnnnnnnnnnnnnnnnnnnnnnnnnnnnnnnnnnnnnnnnnngcccctcctcctcccacctcccccacctccacggccacctccgcttcggcgacaacctcgacgacgagtggttcgccgtcttcctcctcttccaaatctcccaacgcttcccctccctctccattcgcctctgagactccgacggcgacttcctcctcatcgaggccgccttccacctcccccgctggctcaaccccgacagcgcgcaccaccgcctcttcctccgcgacggaagcctccacatcgtgccgcgtaaccgcctccccaacccctccctcattgactccctcaacttcatcgttaattcccctcacgaatccctcgcctccgacggaatccagcgcgccgtcagaaaacgcataagtaattaccccgaacaagctaggaagaacatgcatagggttagggttagggttccggtgtccgtggcgcaggttctgaagcacgagccgcggctaatttcccttgcagtggaagggttctacgatagagatatagacacgatgaagttcgcgtcgaggatggagaggtttgtggagagagggaaagcggaggagttggtgtgcgtttcggtgaagatgtcgagggcgatgtacgcacagctggtgcagcagaggtttcaggctcccaagtgttacccggggatgccggctcggagcgagaaggaagggtttgcggaggcggagctggggatgaagatagcgtgtgggttggagatgatgtatcagcagcggaagcgcgacggggtggaagggaaagggagctcttgggaggcgtttaggaagagtttggagagtagtgggtacttccaagggatgcttccgggttcctctgagtatcagagattgatgcagagtgctcaagagtattatagaaatacttctctgcactctaaggccaggttggaattcgaactaggctattgattttaattcgaattgagtcttgtttttaagttggatgggtattggtctttaatgttttggttgtgtatgtttagcttagctccctaggttatcttattttgtcattgatgagatcccacattgattatgagaaatgtgtcatggacacccattatgctataatacatctagagagagaagtataggtatgatagggtttatgatgtgatagaaagaaagagagagatagatagaaatgataaatgttggtggagtgtttaaaataagtggatgattgtgtatcagtgctcattgattatattcttatagatatgactaaagtagaacttattataaaggctcaagctatccttacctcatgagctaacttttagggttgagttagatccatctcaaattcaagatgacatgagagccaatcatatatttccctcaagtgtccttaaaaaaccctaccaagccctgggaccagtctttcaatgtccacgatctgtatgtccaatctagtgcatgaaggggtgtgttgagattccacattggttagaatggatgggttctctttgttgttgatgatgtatatgttacattagatggggcattggtctacttaggctgtggtgtagtaatgttgttaagtttagctctctgggttttatattggtttttgttattttatcgttgctaaggtgaatatttgttgcagtgacttgctgaatgctcttgttagacgcatagatgaaattcttgctctgcctcatttggtggatgattttaaggatcaggaggttcctccatctgatgatgattcctggctttatggtggagaggaagagttgaactctgttcttatggaaagacaaaaggagatggaactatatgacttaaaacacaaaaagaaagggaaagcaaaagagggacaagatgctggtccatcatctgcttcgaatgctgacgagtttgatcctggtgatatagcaaaaaccatgcaggcatttgtccataagctgtcaagttacaagggtgctgaagctcctgaagacaggttcgtttagtgatgtacatactcatttaacatacctgatatgcaggcaggcttaagtcacctattgtataggcaggcatcttttcagggaaaggatttgggccattaaaatgatttatttttcatgatatttggccattggcagagattcagtaccattgatccccaactgggatactaagtccaacttccctgtctgttaattaaaactgttattcccaggtgtcaaatgtggtcctgattggaaaagcttataaaatagcttttcaaatccaaataagctgttttgggcttattttcataatctaaaaatcaaaacttagaaaactagcttttgtgaagctgaaaccagctcaggtttttactattttttataataatttcttaagttctaactaaaataaccttaattatttagtattgaataacatattaacatgttctatttagtttatggtataaactataaatagttattattcttgctactgattaatttttctggatgctgtcatgatacagtagtaacacatttagatgatactcaattggatacctttctgattttgccgtgttactttactatgttaatatctctttattttgggcacttctcttgtaaaggaataaggaagtagaccttgatgtggaccaatttattaaagacatggaatcaataatgatgcatacagacggtgaagttgccaacagcaatattgaagaaggatcgtcgtctgacctggactttggtgagattccatgtctatgtttactttgtaggcactaattgttttattgaataagtgttctcgagatttaaatagatcctctgtttaattgttatatgttaaaacacttcaacttgcttttgtttgtgtttattttctgctaatggactattttgtaatgagttcttttacaccattacattgatgcatgtttttatgatgtcatgcatgtaagcacattacgactcatgtcttgtaagtttgaaattacttttggctatctgttttgcactttctccaactctcttcccctctctggtttggtggaggatgtgcagcatcagaagtcataactctttctttgttatgactgtagcacgtatagttttcatagaatgaagctaggagcttctctatgtcctttttggctatcctgtcaaaggtttggaataagtgctagcaaattttattgtggcttctctaaattctaatagggctgatgatacattttaagattttctttttctttcttgagaaatggtagtaaaatgttcatctcccccataacacatttccaatcgagaaaaggtcttagtctataatatcttggtgtattgcttgggataacagataaacaaaagtgtacctcgttcaatgctttacctccatctttaagaataaatagaaataaattgttgaactcaactgtgtctccattcaatatttattggctgtgaagttctcagataagttcgaacagctgtctgtagcattctggagttatcttttgggctgaagcacatcacttttagctggtttttaatgtgttaaccacacaatggtttcaggatacatggtatttaattatatctgttaagtatgaatgtttgtttacttaaaaatattaatccttacttgaagaatctaatattccatgctgaggattctgtttaatatagtgtcactaaaaagtgcataataattacatggaattaattcttgcttacaagcacacttttttaaggtttggaactcttcatgtcttcaaggttggggatgcctgatggaaaattgatcaattccctagttgtttaggttactggtatctggatttcagtatgtagaatgaattaattcctggaattcaaccaaatagttcccttggtcagtcaatttgaatgtcttcccccatagtattatttatgggttatatttttattgatgattatgtagatgattctgatgagagtgatattgctgaattggatgaggatactgaggatggagaggaaattttcatgcggtcctattctgatgctatgaatgaagaactgaagacaaccacccttcagaaaagttttgttcgtgctaatgaacaaattccaaagaaggatcaggtatttgtttgcatttgcatgagtaaagaaagtattaaatgttaatctgtaatgatgtgtagtgttaccaaacctggcaaggttatttgaaaggaaataaatatctcattattattaaataaaaatattattttattgttttttaaccaactatcttttatgacataattgttgtattgttacttttgacattgatttaatcttctaatatcttttcttaaaaaaaccaagtttactaaatatcaaaaagagtattttttttttaatctttaaaagatttatttcatatatcataaacctttgaatcataaatttaatatcagaagtttaagaaactatctaaataatttaactttttataaaataaattataatgttttaaaacactatataataatttaaataatttcaatcttgaaatgacaaattaataaacgttagataataatatcataagaataacagaattcatgctcattcctttaactggtacaaaatcttgttaagaaataagtaagacaatgagagcaaaacatgacacttgcatgatagttcactagttcagtttctattttcttcagcgaactttcataagtgctgcagttgaaacttgaagactgatgatttgttctattcttgcttttgaattcactttcagggaacgtcaaatgcatcagaacatattgtggacgaggatttttctcctgtagatgtggatgtaaatttagtaaaaagcttactcgattccttttcttcccagcaagggcttcctggtccagcttccaatttgcttggcctcatgggggtgcagttaccacaagatggcaagaagggcaaatgaagatactgaaatatttttccaggtttttgatgttttgggattctccaaaggtatagtctctggatggcatgtttcccagcatgtttgccgatatcctttctccacattgggtagacaacctgcttagcagagggcatatgggaatacttgcagttccggtgtgactgcaccaggttttgggactccatttgaatagaagtgtcttctttccttacctccagacaaaagcaagagagcgttcatctgtagcatgttcattggcagtaatacaagggcaagagaagtctagggaaaatgcataactatcttatatagcaaatctgtttaaatcaggagtgattatcactaaatgattcccaacagtggtttatattgagtttgggtcatccattattaacagttgatgattgccccctttttttgggttaagcgatttccgttgataatgttacaattactgttttagttaaatctggatttctaccaagccataaaattatcagtaccgaattaggatttataaatacgaagagaaatgtaaaccaaaatactaaattttgtcttacttcaccaacttaggatttataaacaagcaaaaaaataaaaatgaatctttccttctagtgaagagggagctctcaatacactacctaatataaaagaattatcacaaagataaaaagttaaataagcacacagtacggaaatattttacatatgacactgctcctaccggtatttcctatgcattccaggggtcatacaggagaagattgattgtttctttggtttggcgccaaagataaatgacctgagaggaaccttggctcgagtctctgattgtcttagctggccattttgttgtctctttgatgctgagaacccaaattcatcattcaacttcactagagccttttctatttcaagttggagagatgttacaccatctaaacccgcttgaagttcatcggcaaccttgttgttttcttgtttcatgttcaaaatctcaccttggaacttggcagcttggtagcttgtgaacctgaagtcatcatcttcagcactggttttcaatgctgatgttatttgttcttggatgtcacacaaagatgagaatcgactttgcagttcttctttcagcaaggcacctctttccatccagactgttatttcattttggatctctgttaggtgtctgtaaattggtcttgaatctgattttatagaatgctttatgctgctactaccctctgacgacttccctttttcctctaattttgataagtcggtcagcaaatctttgatagtggtttcaaacttctgtatctcagagtaataagcactgaattttaaccagaaagttaagttctcctctagaacttcatccatgtttgacctgaatttctcttcaatgggtgaagtagattcaggtggttcaatttgtaaaagttcctctgtgaaatcctcatttccttccatgcttctctgcaagagacctaatttctggcgcagatgtcttatctcttcatctttcatggcattagctgtcttcagttcttttagctgcaaagatgaatcagagttgctgtcttgatttttcttctctatttcagccagtctctttttcatatctttataattccgaagagtattagtatactcacttagcagaacttgttctctatcctgcattccattcgtaaacaattgctgccaatcaggttcatcttcttgtgctgttgcctgccccttgggatcaactttgagagcattatctatctcacatgaactttgcttagcatcattttctggctgtttctcagaactctctgaagaactatctgccttgttgcttgctgggagctgactgacttcctgattttctgtggtagtgctcacagcaactgttgtcttttcatcattgccaggatttacagtcttctcttgttcttccaactcttttggagattttttttccataggagttgcctcttccatttctaaggaactggtgaccttaaccttatctactgacttagcatcattttccaatgaacgggtgacattaggttcattagcaaatggtgagccagtggcctcaagcttgttgtctgatgttacatcatcttcaacagtaccagcaaccttaagctccttatcttttgcatcatcttctaccaaatcattcgtaagctccttttcagatttaatatcattcaacaagatattgtcctcattcaaaggaacttgtccttcagatttgctttttaattcagcctggcttgatgaatccttttgtgtgtgtgataaatctgtggtcttggcctcctcgcctggctgctgcacgttttggactttctctgagagttgatcaagattgctatgtgcttcattgaattgggtttggagattgttattcttatcctcaacaatttgatttagatcctgtactccatgcatcttttcttccatctttctgagttgttcgttcaatttgtttctgtccttgataagactttccttatcattttccagagttcgaatttgctcttgaagttcatcagtatctgttctcaatctcgttaccatcacagtctgggacgatactgcagtttccaagctgatcactttgttcactagctcatcaatcttctctgccatttctgccacactgagtgatgaattggagctagtctcaaagtgctctttaatgttctccttcaataattgcaactcctgcttcttcggagccaatccggcattctcttccaagtcctttgtttctgctatttcttttaaatctctttggacccttggctcttcggaattactctgttcataatggaattcgtccatgagagagcccaacttggccttcacatcctttacccttttggattcaattctggtttcatcaagtgatttttcctgcttctcttgcaactgtgtcaatgcctcttggcatgatttaagagcagcttctgccatcaaacggcgagcttcatcatcttcaatatcaacaccttctcccagctcatcttgcagagtggaaactctctcttgcaattccttgatttgctcatcagtttcccagtacctagcaatggaattatcataagagttctttacaaactctttcacagtttgtagagccagaatctgtttctgcagcttgtcaacctcttcaagtgcctcttttctgctcaaaccagatttaggaactttcggagcagcagaagctgctgtggcagctggcttcttggaatgaaatttccttgtggctgctgctgttgttatgacattttttaaatctttaatgggaggctttggaatatttgttttgaacccttctgccttttttcttgaaggccttggtgatccatcatcatcttcttcatccataaatgggacacgatctggaaagacagaagcaatggtgttgttggcattttgcaactctgttgatatgtgatcatatctttcggctaaagctcggtaagccttgaatgattcctccacaaagcttatcagttccggtctccttttgtaatacatttctgctctcttagcaaaagagtctccctcttcctctaagagcttcaaaacagtttgcactttttcctccatatctgcagttttgttcatttattttagtttgccagctatatgcatgtataaaggcacatacaagtgggttatgttgatcttacacaggcatctccatgtgattcaagcaaatttttaatttaaaattctaattaacaatgtgtaaacaagcgtccatcgttatatccgcatgtaggataggggtaagcatctcctaaatttctaaaatcataggaaatgacttcaaggaatgcaaactattcctaatttctcaaattagtatatgtttaataagaaaagagaagctgtacaacaaaatcatcgtctgaaaggcgttttatcaagaaaagtgggcaaaaaatggagttattctatcaacctaattggctaaaaatagcattatgtgaattgagtcaaacatactggattttgggaaaattcaatttgaaaagtgatagaggaagtacttgtgtatatatatgtgtgtgtgtgtagtttttggttagttgaagcccagatttggaaataaaagcacgtagagaatcattttcagaatccatgaaaaacaattaaaccttgagcttgagtacataacacaacatcaaaccatcttcttaaacctctctactcacgcagttgaatttcctgattaccgattaatacattatagacaacactctatttttatggaagccaagcataatttaaagatttgattccatagtgaaatgaaattgatcatcaaaagcttataatatatacaatctaacgttgaaagcaaggcaagacgtgccatgaatgtgtacaaaaaaaaattccaccagaaaaaggagataaatggtagagttgatcatcatgttctttgatatgaaaaagaaaatgaagataaattgatgatcacctagaaggttttgctccatccattttgattgttttgttctgatgtggctaacccaccaccatgaataagcattgctcgccgctctctgcaacatatttggttgtttcttcttctgtcttctgtgttatctctttaatttcccttcttggtctttggtattgagatcttaattaataacgtgagtcaaaaagcatgcaaaccgtgtttctcctattactctatctgtttaagatggggaagagaagacatggattccatgacagcatgggaccaagagaagaaagtgggaaaatggattaagaaaaaaaggaaaaaagaaagataatcaacagaaacagatagaaagagattcagagagagagagagagaaaacgtggaaactaagatgttgtgctaattatgggatgatggaagggagcaaagttctcacgaatttagtgtccaaaccttgcttttgaaaaagcatgaatgcaataataaaaatgaaataaagaaacataatgcatgcattgaacgacccacgtgcctgtggcattgtccagctttacttcttcttctttttttttccaacattgatgtaaagttttcacctgtttttaaaaattattaattttcgttgaagaatctaatagataatttttaatatgattttttctcttaattatatttttttcatttacaaactcaaacttaacacttattttaaggaaaataattcaatattatagatcaataacttattaataattttatttgttttacgctcctttgatacctttttcagtgtctttagtgttaaattagctgtgttgtcatatataccgttaataggagaaatcaaacaaaaaaatttcatggagataattgttaaaaagatttagatatacaagtgagtcattctcccaaaggaagtctaaagttacaaacttaattgttgggaaaactttcttgtggtagcatatccaaagggttgagacatggttggcatttattattcttttaagtgaacaaaatattttttaaaatatatttaaaaaattaaataagtatttctttagaaattaactggttcgtacatatacttaatctcacaataaagctgaattaaaaaaagaagagagaagcctttagaattttaaaaatgttgatttatatatcactatcatgcttaatatttcaagttgtatacatgtaaaaaaaagtacagaaactttgtccataagttattagttttagtaatattcaactcaagatctcaagtcaaatctaatagataaaaaaatgtaaataaaaattaatcattcaaaaaatcgttaaatatttcatattaataacttgattaaaaaaaaaaagcatacttcatgtgtattacatatgatcaaactaaattaataattcaacaatgactattttgacttaattaactctatatttgcgcgttttttcaaaatctataaaattttatatattaacttgttagttatctttaatatattcttataataaatctccaactaactacttgatgtttaaacttttcttcgttgcaaggtgtcgcatcctgtgataaagcaaattatttctcctaccaaactgctatgatgttcaaatttttaatataaacttaattcattgtataattatataaattattgtaaagaaaacataaatgctctgtctattactttctaaattttatcgtacaaaaaaggtgcttagaaaagctgtaatgtaaataaaggtggcggtggccgacttttgtcgcggaaagataacggtgccccaaatagaaaattgagaatttctgttatttttggaggcacgttctgttcacgactttggcctgcactgacactataaataggaaaatgttaacgattttttttcctttttgaaatctttgactaatataatagtattgttttcagtaattatgttcttcatttcttctcaccagaaaagatttggaaagaaaagcaaaatcttttcgaaagagaaatcttatctatcatcccactctgttacatattctgtttagcctaatcatccctgtcaatttggggaagaatgcaaaattttaaaaataagtattccatgtagtagatttgtgaaaaaaaattcatgttaggccttaattctataaagattacaaaataagttttatccattgccattacttgtgttcatgaggaattatatgattagtttggtaatcaaggagagtatgagtgagaaagaaattatggatcaaattgttaagaatattatttgtttattcgaatttttttaattaataaaaattaatcgctaatatttgttgataaaaaaatatttatgtttaaaaaataattttgattttacttttacatcacataatataattttcgtaaacttataaactagccatagtgtaattttcagatgaaatttacaattattggaaaattattattaaaaacaaaactcgtcagtgtggaagcaatttccaattctacaaaaaagaaacaaataaaatgaataacttgaatgacagaaagttagagggggtaaatagattcccttgattatcatacataattatagtttttatattttatataaatttaaaagtatccatgcaatatggtacttgctgccaatgttaatttttttattgttttaacaaagaaatgacaatcaacccatggttttatcatccaaaacttttttttcttgagatgggaagatacctgtcgcgtacttttttttgaacatcttaaattgtcagtataaattattttatacgtcaatctattaaaaatctttagaaatgattctttttttctgaaaacaaaatgacagaatgaggagataccccaaaattattggacagttatgttgagactctcaagcagaaattcaccttaaagattattacatagacctgaattgtaagtaacttaacttaattataactactcagttattttctagatgctacaaagaatgtgaaaattagttctggatttttaatcatttgtatcattccatattgactttagatgtgactttaaaaatagttaccaaaagttaataaaattgtgcaatgcaatttttttatattatagtacattttaattaaattctttatgtatacagtggatttcttttattttcattttaaagtttatattcagcaaaagattacaacactatgctctttttccgtatatgtgttatcatccgctgtctaaattgtcttcatttccttgtgtttattttcctgttttcattgcataactcgctatccacagtgccttatattttttttattattattattataagtgccttataatttcgaggtcaaatcctatgtttcattgtaatttcataacaacaatagaaatgaggtgattacgaagaaagaaggaaagaaacaatgggaaagtggcagagacaatcaaatccttttatcatagtttttaccgtcatgcataagatagtgcgattttaaatatcacttttatggaatctttaattactctctatcaagccagagattattccccttctctggttattctagcctttaattccctttctctagtcccttggcgccttcgttgcatatgagatttttttttaaaagatatattgttagttatctctcatgtttatggagaaattttttttatgcaaacaacctttttttttttgttaggaatgagtttctgaatagaaatccaaaattcaaatttggttaacttcttcaatgggtttgggcctagtcccccatttgaacttgattattaaatctaattcctacattgatgaataaaagtgtaattaaaatttttagggagttatacatttatgtattgataagattaaccatttcttcttgaagttcgatcttcctctctatgaatcacgtagtcaaaagaaaccatgaactaaaatagaagagcgtgtcccattcatgagtaaatatttcaaagtaatctcattagacatgcattgcccgtgatgacaacttgacaacaaaatactaatatattctcaactctcaaccccaaagaaatattttaaggaatatttaataggagagaagtttttttatgtgtgtgaatcatgattcctataagtgttttcattttcagggaatgaatgaaatttttttagttgattattagaaatttttagataaatttattaagaattaaagaattacatacatttttactgattattttaattatttatcgcattatataatttgataaagaacatgatatttttattatcatatgccactgtgcttccttgcttttcaaaattattggcctgattcagggatggaacatgaagtttttatcttatgcaggtaagctagagttgatcagaacagttattcaaggaattgtgaatttctagatggggatttttcctttgcctcaatttgttctggaccggatcaacgcttcgtgccgtaattttctgtggggcaaagcggatattggcaaaaacaagtccttggttgcttggttagtagtttgttcttcgaaaaaaaaaagggggtttaggcttttttaatctcaaggactgaaatcttgcgcttctttcccatatcctgtgagactttcattgtaagaaagattctttatgggttcgccattactatttcagagggagcgttgtgtgaaattacaatacttcttcatcagattcaattttgataaagaaaatcattcaaataaaagactttattatctccaaagagttaagtacggaagagaccaaaaagaggattcaatcttggagcaccaatgaacaattgcttgttggcaaagtctatgaatacattagaggtgccaaacctactgttagttggtgttctgttatatggaacccagcaatcccccctaagatgtctttcattctatggcttgctaaaaggaaccggctgcttactcttgacaaaactgcttttttgaacaagggttccctctgcttttttgggctcacattcgtgatttggctcctttccgcagacgtttcacttctttgcagcagcacattactgactctttaattaggggcagatccacatcaagtgttcaagaaaaatttcgttgtctggttatagcaattacactgcatctggctgtctaggaacaagctgatttttgaagattatcaattttttgtaatagaggttattagtaagattaagttttttatatatagacaagcgcacctgttacatttattttagcatcttgatataggtattcttgtattagggaggcttttgattttctccgacggtggggtataccccatttattgttgtatcatttttggtttaatataatttacatttttttccaaaaaaaaagaaaaattaaactaaaaaaaataagattttcacctctcctatgaaaaagttttcataaaaaattgattaaacattccttaaaaaaaaacatccaaaaatgttatgttttttaatgcatatcaaacttgagaaaataaaaaatttctcttctaccaaatgtcccctaagactttattttacgggaagaaatgtttaaaacttatttactgtttatttggacagaagatttaaataaagaaagaaatatatttttattacatccccttaacttacagagtttcctcggaatcaataatgtgagagccacacaataaaggcaatcctcaaagttaaggaagaatggaccattttctcatttgattgagaaaaccatgtggctcatctatgcattggaccttcatgtggtccaagacttgatatgccaatttggataaaaagggttatggagatttacagccaacaggatagggaagagataaggggggaaactgcaaaatgaatttatgaaggaatgtattcaaccaaccggcttgcgttgcaaaagtcaaatgttacaaaaccaaaagctctccaaagagaagtaaataaaccaaaatatatatcttctctaaattaattatattttttattgtccaattacaaattaaaaaataattggtgaaaagtatgaataatcaagaatggcaattgcattatccatttaaaatatttattattttataatcagataccatgagttattatagttatcacggtgcttcatctcctgctttagttcattggaattcttgtccttctctcagtgctatctgttaagctgatgctctagtcattgtatctactaggggttaattttcctttttcttttgtttcttttaaatttcacaacgataaaaaaaattagggttaaaaaaaatctcatcttatcccaaacatgactcctgcaatcctccattataacaccatatccattatcaacatgaaaatcccttttttttttatagtgaaatacttttatttatagtagtgattgattggccatacagaattttctagatcgacattttccatttcaattgaagcttttacagtaagaggagaggatgattctatgtacaaagaatacattggatgatggattattttgcctcctctctacttctagaaggatgtcagaaaggtccgtagtcatatagaagatgtagttttctacgcttctaaattcttgagagaagccagccagtgttccatgtaatttttgccagctgaaaattcaatcacaatttcaaaattacaataagtgcagttctctagtctcttcaaaatgcagatacacaaatagtacatatcagtgtatcaacagatatcatcatgtaaacgaatgctttcactcaattgagtttcaacaaaaattcaatgaaaccactgccaatgccatcattaattacaagacaactttccctagttttgatttgtacaaagagttcaattgaaaatggcaggttgttattttaaaaacactatagggcctaactaaaaatttggggtatgaaattgttacaagttctcaaacaaactttatccgtgtgtcctaggctactacaaaatgatttttaagtataaacgtacatccaaccataaagatctaaaaactaggactcatttttcatcacacaaaagaaacagctcagaaatagaaaggaaagaagttctgctaacatatcttattaagatatcatatagtatacaatacgctatcttttatttctgtttattattaaaaaaaaaattacagggtcgatgatgagagaaaattaagaagtcacttgactgtagtaaaaaggaagtcagtgattaattgccttgtatagtgtggaatttaggactttaatcaggtagtgaaggtgaagtgaagttacttcagagcataactttttatctctcatgaaaacagcttagtaaaaatttcaagctaagaatttgataatagaaaaaaaaaaaaaaacaaagcacatggcagaagcataaggaaacctcctggaacagagaggatactatcaaagaaaattagctcataaaagcaaggcagcatctttgcaaagcatggatgaaaccattcagaaaataaaagaggagcaaaaacccatataggatacacacacaaaaatacaaaaataaagttaaataaaaaaaacaaaaacctcgcagatcgatgcatttgaagacaattctaaaaaaaggcgaaactatttggtctatattatgtatcatgtattttcctatttggatttagcgagttacaagccccaattaccattgcatttataattgctaagcagtgcattagcatctgataatgacagacacatttcctcattagcatcagaatcatcaacaaggccaaaccaactaaaaaattatggattatactatacaataacataaaaacttaaaaagcaccggaacaaggattgttttgactttaaagaaccagcacaaaaaaaagttaataaactcaaaaagttaaagagtgctaggagtttgaaagcgaacaaaataactcaatgaaaacaaaatcatacacaatttaagagtacgttctgaatcttaccagaagaaaattcatttggaaggttcttgatggcactcaaaagctccttgtttgaactctccacctccttcctatagcaaggaactagcacagcaaaactattgtccaaatcatcatcactctgaaggaaatcagagccatgaggctccaaccacccaatggaaaaatctgagtcatcagattcagagcttgacaaacaaccatcaccatcagatggcaccaacacaacatcatactctctatcatgtctcctctcttccctgctctgccatttccttttaaccttcctgtgagaaggagctatctttgttcccttcactgaaggaaacttaacactctctctttccttaaaactccattcagaagatgaattcagtgtagagccaccagaaacaacaggctctttctccttgttgctacgaccccacaaccaccatgacaaacgtgtcagagagacagccatactcccaattgtgatgatttcaaaagccaaagagtcacaatggttgaagaagctcttttggaggccaaagatttgtgaaagaatgaggccaaaaaatttgagaaacggaatggccagtggttcctgcctgttgcagaaaccactatattaggaaatgatccgttgattcattaacaaaaggagatcaattggaaaatggggcacacaaataaattcaacccaacaaactcattaacatcaataacaatcaacaaaaaaaaaaaaaaaaactttttgataaaacagcacaagaacggattaaacagatgcagtgaatttaccaaggtttttccaaatatcaaacccaaattagcaagttgaagaacttagcctagattagattcactgacccatttcccaaaattaaatgttagcaaaaaatttctgacatttacactcccagaaaagcacaagagtatattaaaaaaaaaggataagatagttatcagaatcttaaaagaataaattttatcttgttttttatttaccaaaaaatatcaaccccaaatctcaaacacaatgacactcactcatgctcggtctactcaacgcaaaaaaaaaaaaaaatagaaaataaaaataaaaacacaaaatccagtaaaacttttgagtaaagacctttgctttaggtcaaaatcaagaattcccccaaactcaattcaccaaggaatccccggaaaatcccactatcctcgccgggaaaaccgaacctttcaaacagctatgctatcgaaaacaaaagcagaggagatcggagcacgagttttctccggcgaaaaaaaaaaccggcgacacaatgcaaagactcagtgagtcaattcgaaaccctaactcgccaattatccctcgctcactcactcactctctctaatcttcttctacttcttcctccttctgcctctgtttttgggtacactgagaaccaaacccaatcgctcaaaatctcgtcttcttctgaatttataggctattttttgacctttttcatcttttcacatccaacgctccagattgcacccgttattctgatgaacgtccagagacaaggtcttatcctcttactctacacccccgacacatcttataacaattcattcctggcctatagcataaggtagttaacaatatatgttttttaatcagaagaatattggacgttgattcggtgatgagagatataataaccgtccaaagttgctgacgtggatgaccattaccccaatcatgggatgcatgtgcggccaacttgtcgacacgtgtcaataatgtcaccctaaaataatatatataggattatatggaaatggaataactaatgattaagttaaattaaagaagtcgtgttttttttttataagttttccacttgtctagtaaaatgagctgtttaaacatatttttttttaaaactgtcaaatatgctatactcggagaataaaacaaaatcttgtaacaacttcctaagataaatgagaaatcaaatcaagtttatcttctccaaactaacttctgtatcaagcaggaaactaggaatctcattgaccatttagcaactccaatcatccaatgtcagctacatttttccattttcacattaaagattgtactgcttgtagtgagttatattggaaaatactacagtatataccaactttagcaatcttaattaaataactatagctattgtgaggactaattttgaactgattgaattaattatgaaaagttcataaatttaattaacaaaacatctaaatcatccaattaaatatttcattaaactaaaaccgaggttattaattggtaatcaatttcaagtctgtattggtgatttaagaagttgcattatacaaatcatattcaggttaaagagggcacgaaacaccttcgtgattgatccgcaagcttctacgaaattgattggagtcagtcatcattttttctacgagcaaactgaaaggtgggtgtccatggagtaatcaatactcaaagaatatagaatatagaatatgggaattaagtaatctaaaaaaaactcatagccaaaacgatgacaagtattgacgtaccaagaaagaaaaaaaaagtgtgtattttctcattggattttcttagaaagagctccttcaattgacttttgcccctttgcctctcttcttttaaaagatttacatcgttaccgtttggctaacgctattgccattgatgatacgatatctaatttaaatcatagagttgcaagaattgatgtttccatatagtaattagggtagttttataaatgaagcaaagctttcatgatataaaaatatatagtaataaagggacgctcgcgtatttatattcttaaacaagatccaatgtagttaaagttatagatattattatttatctaatgatattttctttgatcggatttagccattcattttcattgtttgtgtcaccgatgacatacaatccaattatatatgctaaatatgctatacacatagtacttacttctatagcttataatttttataatctaattaaaacaattttcattttgtttttacacacggtttttatgactttatttagtggaaagtggtgtgtttcaaagtatgagcaccaaacaaattattgctatatattttacgtagtgacaataaactttttaatgatgcttcttttttaaggtgttctgaagataaattttggcctcacctaaactgtgctgtacatgttaaatacaatatatatatatatatatatatatatatatataatttggaagaggaaaagaaaatttcgaattgatggtacttttatttcctttcaaaaacattatttattgaatttattttttattcactaatattataaatacttttatattatcaactaattataaataattatgatataaatttcaaaataattattatcgaaaactaaaaatcttattatgcgtatcagtctacaattagatgacaatacaaaaaaacctacatcgtcatgcaatttaattaaattcttatttaattatttatgatttttttacctatacaagagaaatcttaaatatagtcgttatattattagtttattattattattactgtgatataaacctgaattcctaaaaacttgatttttccattttttaatacttttgaaagtacactttgttttttttttacttcaaatgattatatactatatgttaaggaatgatataggcttaataaaataaggtcaaattacaaatgattaagtgagtgaatttatgtattttccacaaaggaagccaaggtcgtctcgtgatgtcgtggtacccacaaatcatgctatgcaatttcatgtttcttaacactgtagttaatataagtcattgataaggaattcaacttgtttttttcacaaatggatccattacttgtttttttttttttgttgaaaggtttttaattgtgtcgaagggttctagagtcgaacgaggattcgacccaacgaaggtgataatgaatccgtcttttacctagatttatctcttttcatattgaccttgttgggtatggggtgtatccctaatcatgcttactagttgaataatacttcttataattatgtttagttatttcggatgccacaaaggttgacgttattattccttgaagatatagagataaaaagattataaagaaatgacagaagaaaaaaactagacataataaaggtatttttaaataaactttctcaaaaactagatgtagaaaaaaaaaggctcttcataattaaaaaataatttatgcgtaagttaaaaaaaaagatttagagaaactactaatacaaaaaaaaaattttaaaaataaagttatgcatgaactaattttaacttataaataaatttatttcattttttaaaagtatttttggaaaaatttatctaaagaaaccctaaaaagatatcattccatttgttacgactttttcctaaaatgtcatttaaaatattattaatttttattgagaaaaaatattaattttacaggttattcttgcatttattttaatttttcaaaataagtagaaactgaaaaagaatataaaatctgatcaaagttagaaggtattttaaataatttataatggactaatttgtttaagtttattttttaaaataaaataagcagttttataattttttgatgtatttgtctgaactgtttttacttaaaataagtagttttctactttttctaagaaacaaattctatatgtttctcaacaaatgtttatataaaaagaatttttgaaattttttttattttattttaaacaaacagggcaaaaataagtttttttttttaaagttacttttatgattgtaaataaaacataaaattgcattattcttttttttataaaaaaagtaatcattgatacattttgtatcaaaattactcttttttctttgatgactttagtattgaaatatttttgtaattataaatattatgctattaccaagaagaaaagagactaggtatgacaatggggtgtcgcggggatcggtttaggctacccacctctgccctcaacatctcaaacgatttccgttgaggttaaaaattagacccaccctcgcctttggttgggtattggattttcccatctcaaccttgtccccaattatcgtgtcttgtgcaataagatacaatagattggattgtcgtgactcccacgaatttgcaatgaagggattggtgtcgttgtcatgacgattgtaaggatgggatgtgattgtcaatgtcattgttgagactttcacgaacctaagatgaaggaggggtgttgtgactgtcgcgataaaggaggacactcagcaacagatgaacactcagagttaggtttgaaggattgagaatgtgaggagtgacacaatgagagtaagagtctaaggaattgtagttaatgataagagtgagaagaggcaacaaagacatatgtattagggtatattaatagtgggacgggtgtaggtacaagacgagcatcacaatacccaattctgctctaccttcgactttctcaaacgggacaaaatctaacttggtcaattcaatttttcccatcaaactaagaacaagtgcagattcaattgccatgcgccatgcttaaaagagattgggaaagtgtgtcatcatcttaaaaagagaagaaagaaattccaatttgattgcagatacaattattaaatacaactattaaatgttaattatatctttttcattcacaaaatttaaattcaaaaaacatgttgattaagagattttaatcatattctagttgagaagggatgaaaaacaaactgaaacttgaaaaaagattagaacaaacaaatgaaaacaataaagaaaaaagccacgcatcggagattttcactcttgcacttttcttagtggagaatgtgaggtttgattcagcacaataaaattggattgcccaaattattgagaaatcctagactaaatgcaccaagaatcttaggctctaattcactttctaatcttattttttagggccttatccaacctcaagcaaattcaaaaaattattaaagaagatggcatgggacatatataaggtgaaagttagagaataatgcacacattgtacagtatctacgattaagaagttgattgaagagaaaaggaaaaaccatatcaaatgaacttaatcatgacaatcactctttaggaaaagtagcatcaaacttttcgtgatagcagataaaaagggttgttttctgtttcatagggaaaagtatatcatcattcagttacaaattagtcatgttaatgctatcatgttaccgtttctctcgctctcgtactcatcttaatttccactaatcaactctgttgaattgttcactttatggttggaacacttgaaattgtaaaatggcctatttttagtgaagttcctctctagatttattcatttctcatatatctcatttaattttgaaatatattgtcactgttattccttttaagttttacccatcgtctcatacatgatatttttcataatatcccgtcattcccgtgcactgttttgttatattgtcccgtgtatggtaatttttacaagattgaagattattcaactaccatgtttttaattcaattttttttctaaaattttttcccgttgatgcgctgtagaatctagattaatcactcgatataataataggaaaggaacgtacataaccaaaatttccaactgatatagatttacatgaattgaggtaaggtaatcaatttggccgcaaagtacaattgttaagaaaaccaaattgtggccacttgctttgtgtcaaaaagatggttgtgggacatatctacccacttgtactttagcctgacttcatgttaattaacttgcaggtgaaccctttaccttcccccacttggccactccatgtgctctagataccaaacgacaacacaagatatttatttatttattttctctttccttgttacttctttttttcttcattggaaaggaatttccgtgttacttcagccaaatgttaattgttttcttttattttctataaattttctttagcgtgctggatttttttttttgagtgaactatcattttatttcttgaaattggaaagcattattatattaattcctgaatatttttttttaaatcttaaaagtataaattgacaatcacataaatttgaaaaatgtgtgacttaagaagtaatgtaaattactaacatgcttacagaataaaatgataataagtcttattcaccatgtttgggatttatttgatattttctttagaaaatgttataacccccaccaatgattttttacttgatatttttttctaaagatcctgcgaatttatataatattagttctttctcatggacaagtggagtatttgtatattagttgaaattttggcatacaaaattgaacgtcaagacaaagccaccaacagagaaagagaaaagaattaaatttgttttgtcaaatcctgtcatgttcaccaatattatttgtgggataaattcacaagtatgaatttttgtatgatctacacaactgaccaattcatgactaacacttatttaaacttgttgattagacaaaacaaaaaattcttcttagtgcatcctgactaaaagtattactgggttcataattttatataattataggatatgctatagaatcatttgaagctagacaatagaaaatgctaatcgtgcccaccctgtcaatcagtgttgttttaggaatatatgaagatttctgaccttatttgatcatgatgattcttcttttatgttctttcctcgaaataaaaaatgttggacactgaattttatactatatagcatcatattttcgtttctgtatgcttgcaacttgcgctgaaaagagagccagtgtctcaccaatttagcaactctatgtttagataaatgttgagaatgtgctaatacactttccgaattttaagatatagaataaaaaaggaagaatttgttgttctaagaatagaatactaaaagtatttttgaattctcccagctctcctccaaacatgtatttacaagtttggttgaattgccaagttagcctcttaattcctcaatcttctgattcaccaatttattagtacataaactatgattgccataaattgagtaaattaaggagataggttaagcctctctccaattatatatcatgatgagttaagtagagacaaaaccaactggcatgtattcttatttatgtggatgatatgaaagagagcctgtaaattactatcatagagggggtagacggctatatatcatagatggtagattttcattttctagtagttgaaggacttaagtaagaacagtgaaaagaatgatgcaattggcaatggtagaagaaaagtaaggttgagatagaaggaatacgtgcacgcgtgtactttggtagtcattttcattacaatttgggttagtgaatggttcacatcaaggtatgtagtagtacgtgctaattagacatatagctacatgtagcagtgaggatgcatgtgaatgtgatagggtggactatatgcattggagggccttgtgcctacacatggtttcttaatttgtctgggcatcatcatccacccatttgtcctttctagaaagttcattttggctaactaattctcgatccgttgaacaggaaaatgatgtagttccgctccaattttgggaagatatgatagaaaagaagagataaaatgaataaggtaaaaaagagatgaaaaagaaagtggaaagataaaactactctatataaattgtagaaagcatttagaatcacatggaagggtgtgtttgatctccgaatgacacgtttcaatttgagtataggatgaattaaatatgatttttctattgaccatgatatttgatattgtgttagtgacatgattccaagttttttttgacaaaataattcataagttttagattctagtttaagtttaattgaaatttgttattggattttgcatcaaacactaacacgagtcatgctattttttgttcatatacatccttagttggacttaagtatattttggtaattatccacccaaaagtcaattttgatttcaagaattttcaaacaacattttgtgttaaaataatttttttaatatttattatctagacaaaaattaagttatcacaaatttatgttttcttagaattaattcttcaaaatcacgttgattcaaaattaattatacgaacacacaaattattagttaatgtgatttagataaatatttacattgtgtttgaaaatgctttgaaagaccgatttgtcatgaaaaaaaagtcacgtcatttttgaagcaattagttcttgcttttgtcttttttatttattattggatgtgaaacattacatcctaaaatcatatccaaaacacgtttcgtgtgtttggtttcacgttagattagatatataaaaatccaaatatgtcgaatcactcatgttatgattttttacatcttaagtcttcccatttctttatctggtttatattcttcatgcagcattcaaacggaacgactctataaaattatgccgcttcctaaatcacgttaaaatattaattaaagtgatttcaaataattttttttaattttttatatgtttgattccatgttgagaaattgattttggctaaaggaatctgtctggcctccatacatgtgctttgacttttatttggtacaaccagcaaggaggaccctaaaggcccaaaacaatcataaagaaacatatatgatgttcatacaatcttgcaatttaggctaaaagaacccgtttggcctcccaatgagcatgtctagcctccataggggcatcgttggcctccacaagaatctagtaggcctaggcatggaaggaattctcgccccatcttagagcaaactttataaaggattttcctttacctaccaaggaaacaagaacaaaccaaaacctccaaataacaagaataatatttcctatactcacccagatgtggggatgacacttttcgaaactcaatcaaacctatttttaatcttagatgtggtaccatgaaggagctctaattaatgtcaaagttaggccaacaagagatcaaaagactaacaatgattcttagacaaaagacatgtttccaaacgagcaacaactctttatgtatgcgaagaaagattgtgattcaaagacatattgtgaagacgaccacgaaactccatttcagattatctagtttgttctcgtgcatgcaaagagagatcacaatgaagctctgttctagataaatcttgtttgtttctcgtatgtactaagagggatcacaatgtgaaagatattgtgacgaagtttggatctagataaatgttgtacatgtttgttctcgtgtgtgtgaatagagatctttgttgcaaaattaagaggagatggacacacaatttgattttttaccaattgtaatttcttgtgtgcatggagaggtcaccataatgattataggtataatgcataatgtgaagctggaaggcctcacaaaatagaagaaaaagtgttcttgcatgtgcttccttaatagattcatggatactttaagctctgataccatattataatttggatttttgggcctaaataaatcttacaaaattcacttgtaacgttaggattatcccatacttatatattttaatttggttatatgactagccatagtggaacctccaacatgaacaaaaaaaagaagagacatgggatggcttgtgtgtctaaatgagaagtgaagggacatgaggaagaagaaaatatcttaagagttaagattaaggataaaattagaatggaaagttttaaaaaaatggggaatttagttataaaagaaggggtgtgaaaagaggggcccaatattaatttgtcatggaaaatattttggccctgaaaaatagacagctgaacaaagggcattgctatgtacacccagcaaaattgttttttttctttcaaaaatatattttacaaattaatttaaaattgatggcccaagcaagagtcaaacctatgacttttaggttattagcacaacgctctaaccaactaatctaatagaccaattatattataaaataaataacgttgttatatataacactaaaatttctaacgtatatttaatgtgcatgtaaatttaaataataaattttgtgataatccgtatattatttataaataaaaaatatttactattaaaaaatttaattttttaataaataaaaaaacatatttttgaaaataaattttaaaaaaatacttacagatcatgtaattcgtaaaaaaaacctttaagggcatttttggaatttcattttactgctgggtgcacaagcaatatgcctagtgcacctagcaaagcccccgaacaaagtagtttttggactgggccgaaaaaaagcgtatacaagcacaaacaatccaacggctatctcgttcaacaattgtgattaaataaacggttacgtctatttatggttatgaaacataatatggattatggaataaacaccttctcatttctctccgattttcctttcccaacactttgctcgtacaaactcaggtcagtttctgggtttcacttgtttctttcttctctctctctcttttttagtgtttgattaacatgttgaaacatttttaacccatgttattgcattgttagcattatttaaaatgttggatgtatggttcagtgtcatgtaaaatgcaatctaaccaattgaaatgaaaaatggaacctgtcatatttagtttcaattaagagggtatcatatcatatacgtaaacaggtaaaaaaatataggaagcgaattgaatgaaggtagcactatgttaaggctgaatcaatcaagcctcaaatggggaattgaatttgatatcgtattagcttctaatgacgaattgtatgtagcattgacattgatgatatcgttattctttctaataaatatagggactgtgttccttttcctatgcttaagacttaaagagaaccaagcatgttgtgtttataacatcaactattagatgttctaatgtttaatttttcatgactttaaactttggagagaagcaacgtatcatggggtgtgtttctttttaatgacttaaaaatgatatgaatattttttactgccatggctgatcatagatagttttcctaggaaatactctcgaatgatcaaatctgaacaatatgtacctcaagttcaaattatgtaccctccaatatttggcattatatgtcgtgatttagaggaagaaataacaatgccaacttgtattcctactccaatctctctctatatgcaaactgcaatgttttttccgttgtctatgtacttttcttttatcttggttttggtctggaatcatgtagctcttcatgcctttgttgtattcagtgctggcaaataggttttttgaaagtcataaatgtgaaataccaagcaatggatgtttatgaagaaatggaagaagctaaagctgaaattgagaaactcaaggtaaaactaggagacaagacaaatacacttcagaacataaagaaatactatgatgcacaggtcaataagatacaggaagctattttcaaagttgagaagctgaatcaagaaatgcttcaaaaggcagatgatatcaatgatgatctcaaagagagtttaaataataaagagtccatcgccaaacatctcaatgccgcaaatgatgaacttggagcaaattgtgatgataaatttagaaagtggcatgatgaagaaagagggtatgtattggcgttagaggaggcaaatgagaaactggataaccaagaaaaacagatgcatctgagtagacaagagattgaaagcatggaaggttgcttttcaatttcatacaacaagtgtttggaaatagagaaaaatttagaagcatcaagcaaactaggagaagcgaatgacatgtttcagaagttagaggaggaaaacatgaaggtggaagaacaattagaatggaaggaggaacattttaaacatcttggagaggtacatgaaaaacttatagatcagtttaaggcaagtaaggagtgggagttggaaaaacctacattgcttgatgagatttcctcattgaagtctatgttagactatcataaaagaatatcgcatgatctgcaacaccagttacagatgtgcaaccaagcccttgctcatgaagaaagcctgagaaagcgtctggaagatgaagtctcaaatttgaacaaagagaaagaagagaagtgttttcaattgaagcagatggagttgaaagatgctgctttgatcagttccaagaaagatatcagtgaagagcgagagcaagcagcatgtttcatgaggcaggttgagtcctatggacttgccaatgaactgctgcatttgccacacaacgaatttgattggcacaaggatttgcatatggaagatggtttcaaagaacaacttaatgaagtttatgatgctttagacagggcaaacattgaattggatgagagaatatgtgaaaaaagtgaaatggagtttgaattgagaatatggaagtcatttgttgaacgtttgaggaatgctcttgaagaaaatcttgtcatgcgaaaagaactggaaaattcactccttgcacaagtagattttagtgaaagcctcgcgcaagagaaagatagcctggtttataagttggaagaaaaagagaataaaatagaatgcctgcagcaacatgttctcctatttgaacaagaaccaaaagtaaaggaaacagaagcttctgttccagcaagcggggaaatagctgagtcctctgaaaatgttgaagtgagatatctccagataattgaagagaaggacaagattttagaggagttccaaaaagaggttcttagccttgaacaagagtcattaagaagagaacttgaaagtgctatgattgcaaaaagcaacatggaaagaaccaatgagtttgagaaagagaatcctattcagattataaagggaaagaatgtgagaacagatgaactcatgcaacaggtgacttcactggaacagaagttcactaactccttaacctccatttcctcacagcttgctgagaaacaggcagaaattattcatgtcaaagaagcttgtgataagatcacagcagctgaagttctagctgcacttgaagttgaagagaagaagttgatgttagtggaacttgagtatgatatccatgatatggagcagaaactgaaactgaaagatgaaaattggaggcaatcagaacagcttgcattggatattgaagaggaaatggatgcaaaacaattacaaataaaagagttaattgatcaaatggagaacaagcttagaggctcagatgtttttcttcaaaaactcaagatagagaatagaagtttgcttgaaagtgctacaagattgtcatcagaaagggaaaacttgttgggttttgttctgggattgggtgataaaatgtgtgagtgcactactgcagacactcaactaatggacacattgagaagcatggtgcagtcttttgagaatgatagtctaggaatcaattttaagaaggatgatgaattgcttgtaaaagagaatatgataatgcattctcccacggggataaagaaacttgaaaccttttctgatataaggtcaccatttaaggagctcgacaattagttgcttgcaatagggaatagatttgctagaggaatgagatgtgcttctcttatatttttagcaaaaatgccattcagctttaagcatgaacatttctagattgtatgaaattcttttgttttattttgcgtattctttagtcgggtttcagtgcacttgttccataaattgcacctagttctttttttatataagccaatatttttaccctcacgagtgatcttccataaattgcaccttctgctttttcttagaatttcacagtttgtaaaacatttttgcaatttttaaccttaaaataatgttttaaatttttacattaacttttaaatatactccttatttaaaattcctcaaataattcaattgctaaatgttgattaagtcagtaagaattacgtacaacttacagatattttttttataataaaaatatatgaactgtatctaataaaaatgaataatttgtatttcacaaataaaactttgtaaaaacaatattaaaaaaattaaaacattatactcattatatatgaattacataaaaatctactttttatataaatattagagtaagagtaggtctctcgttttctttattttctcataaaagactccatttaaattttcaattttatctcaacaaaaacaccaatgatatgatagcgaaaaaagtgaccactggtgtgaatacagcgcatgtctgagaggacacgtggaaatcaaaaccgtggctgacaagacaacatgcgaatttctggtgcacaaatgcggtcgggcccacaagaaatcaaacttcaatcaatttttttttttaattttaaataaaaataatggctctgtttctgttatgttcctttgcgctgcgcctcgtaaaagctggtagacaaaaaaaccattggcgggtggaagctctgagagagatgcttcttcgtcagaggtaaccaacccattttccaaatttctaatcttttatgcgcatattttagttttcccagcttaatctgatgtttcactgcgtattccctgttttatatgttcaatcctccccccctcccaattttttgtttgtctatatcctgatgtacgtagctaattcaggctattttttttatgaaggggttatcaagttttttattttgagtttacttttagtgttttggtgatgaaactgttgtatttggtggtttagaattcagggatgacttaaaattttaaggcgtgagggttttgatattaacttagtgcatgtttggtttcatgttcgactatccagaatcaattaaaatatcagttatcttgattttagccacatgttcacatgtttgattccatggtaaggaattgatttagagtctaaaattaattttgaattgaagtaacttcaggtaatttttgcattggataaaatttatactgagttttcgaataaaaacatctaaacataaatcacatcatttcaaagttaattttaacgaaaataaattttgtcaatgcttacccagaaacacacttagagatggtggtgcaagggaaatgattttagttggtccaaaacttgtacacctaattatctctagatgtaggtctaattctatgttttgtgatgcctttcatcaggagctagtttcagtcattctagagcttcactggaatttagtctcagaaatatgtacatatttggtatccttggccttttgatggtcatataattaatatcagtttagctgcaggtagctgagttgaaagattatcaaatttcatcagcagcacttgatctacgtagaacgtgttgaattggtgtaaaaagtctgaaatactatatttgtacattctccggctactagtgagaccttcttggatatctgtttggatacaataatgactcttcctggttccctgcagttgtcccatggattgggactttgcaggaacctggactgcaataagcatttggtacagaaattctctataattatgtattctttgtgcaaggttcattatttttgcatctgttctcaccttcatatcacttttacagagggccatgggacgtggcaagttacatttatttagtgcaggtccttcatatcctattttggtatgttcttaaaatatagtgatatggtcttgctgcttgctgctaactcattgtgtaattggtgtgccaaaatattttcatggtatagttgtataactttaagcgctgtgtctttgttattttttgatttatagacttcttgggagttttggttctacacaatttattgtcttttatcatgttttggtcttgggaaatgtttttcttagtttgatctataataagagaaaaaggtgagaataataaaaatgagaatgttaagagggatatgtgaccatacaagaaaagacataacatgaaatgattgtacactatgaggtgttggtgtgacaccaatcaaggaaatgttgacaacatcatttaaagtgatatgaacacatataaagaccattggaagcaccagtgaagaaagtagattgcatggttttagtcctatgaaaaggggaaggggattttatggtgaataatatctctaaagattttggtctttgaccgagtccaatggcattgtgtgatccatgtagccgatctcacctagtggctagtgggacaaggcttttgttgttgttaatctataataaagcttaacagcaaatggttttttgtgtagcttaaaatcttaggtctctttttccttcaataaatgacttagctctagtttggtaagaatatcaagttttgttaagtttgtagctgcttatgaagtagttagatgagagagcttttgaaaaagtcaaagcacataagctaattttaacttatatgagaaatttgattcattttcctccttgattgactttattttcatctcttctaagtgtttgttgagaagcttatccaaactggctcttattcatttgcattctaccagtttctgcaatattgtcaggcaataatgttaaggtgttccttgtgtgcctggattcattgatgattgaatgtttactatatagtattgaggataacctgattgaatgttaaggcacagtcattttctttgttagaatttactgtaagagacaattttctattgcagttcatgagacaggaatgcaggggttttcaacaccttcgtcatataaacaggccaacacatacattatcttgcaaatcccactcttttaagtgtcattcttttttagtgtcaggtcaaccaaataatcttcctgctgttaaggtggctgctactgtgttggctaggtaatttttgttttttactgccaataagtgtacaaatttaagcaatctacatgtttttttttgtttgtatatgttaaaattatggtgttttagatatagaaggaggaagagagataaaagggaatgaaatgataattgatatgacaatgtattgatgtgttcataaaacctagagtactaattcttatttctactaatcataaacctaactaattaaggaaatatggtaatcaatcctaagtaatagcgaggaaataagaagcttttccatatataagatacgataagatgtttttggatttttccatatattttaacactccccctcaagctaacaccaactaagctttaagcatattacaaataaccctttaaataaaagaaatcaagctatatactggattttcccatgtattctaaagcttactaattaaaattattggatatttccatgtattctgaagtatacactcatgtttttatgcaggtcttgtaatatattgcaaaatagtcctatcatagtaaagttgattcctgcagttggcgttatcatttttgcaatatggggtgttggtccattattgtttcagacaaggaaattactttttcaggttatattgcagatactctatttttcatccttgtattaattgattccatgtaattaatacctaagtttgatattgcagaggagtgatagtagttggaagaaaagtaccacttactatatagtagcttcttaccttcagccattactgttatggactggagcaatacttatttgcaggtttctctgttatgacaataacttaatcagattctgaatacactatatcttttcttgttgcgcctattctccatgtactgaattgttaacaaattgcagagcattggagccattaatcctaccttcagaaactagccagattgttaaggaacggcttttgaattttgtaagatcattatcaacagtactggcctttgcctattgtttgtcaaggtgtgcctatttccttgtcagttttgatttcttgaaactgatgaatattttggtcacctaatgatgcacctaagttctttgagcttttgttcctcttttaagagataaattgtctgattttctattgttatggcaaattgtgacaccttacatatttattttctcgcggctttttatttgctttatgatggaaccattcaactataattctttcaagattatcattgtcgtagccagcttgagtactccagtctgattttgggttcaaatttaaaatgcttactaagtttttcttccataaactaattgtgcaatactctggtgcagtgtaattcaacaagtgcagaaattcttagccgagagtactgatgcaagtgaggcgagaaatgtctgtatcttttctttttgaataggcaactgatattatagttgtatgaagtttaaacatgataaatatattgtcaattccatttatgtttttacctgttggctgtcataaatttaattgctattattatgactccattgaaacttgatttttcaatcagtcagccagtaacattagttggcaatatagttgcccagctatataatgatgcaaaattgttcagcttttggatttagcatttctccctatcaatttgttttacacattctgaagattatcaatgtgctaaacttctatctacagaagaacatgtagaactgagaactgttgaatatatgatggctatatctttttctatgtacataggctaaaacaattcattatgggtgtgcatgtatttagatgatatatcatttatggaataccagtagcttggcaactgcaatgccaattgaagatgataattgtaaaaaattggatttgggcgtattgttttgttattagttatggttcaatttcaatgacatagtaaattgtctgtttttgttagatgggattccaatttgctggcaaagctgtttactctgcggtatggatagctgccttttcactgtttatggaattgctgggcttctctacccagaaatgggttactgcaggaggtcttgggacagttttgttgacccttgctggtcgtgaggtgtgggatttatcattgcttctaaacataacaattccttgtagtttagtggccaaaatgttattgtggcacctgttgacattcaatgatattttttcagatatttacaaacttcctttcaagtgtgatgattcatgcaacccgaccttttgtggttaatgaatggattcaaacaaagattgaaggatatgaggtttctggtacagtcgaggtgtgttgtactgtaccttttaacttttgaatgtgggaatttcttacattaaatatgtacaatattttttgtgtaataatcgatacccttgagtcattcttttgagcattgatgttttcatgctgtgcagcatgttggctggtggtcaccaacaattattagaggtgaagatcgtgaagctgttcacattccaaaccacaaatttacagtgaatgttgtgcggaaccttagtcaaaaaacacattggcgaatcaaaacccatctagcaattagtcatttggatgtaaataagattaatgtaagaaacagttttattgtttatagttaatttttttcaccaacattgagcatttaatgataattttccctgtgatgtgacaaatggtttaatgcttctgcagaacattgttgccgacatgaggaaagtattagccaaaaatcctcaagttgagcagcagaggttgcacaggagagtgtttttggacaacataaatcctgaaaatcaggcacttttggttagtatgaagtagttaatcttgcataccaatgattctatgctaattgacagggatcttaaatacaattttattctatattcctcttctatataaataattagctacagtacatcattatgccataaacaatttattgacgaagaattcattctgtactttgcattttatagattaacttaactttcagttccagtaggacaaaaccgtgtgtcttttgtaatctgtgatctaacttcgtgtgctttctatagtcatgattcatgctttaaaccctacccctggacttcattgtgattcagttatttgaaaaatgacacgagagcagcaatcagtttctctatgaaaatttggctttcttcctcctattatgctttatatttagagttttaatttagtttgaggttccatggtaaatatcatgtttaaataagatacttttgttaatgctgtattcactgtccaaaatcgggtatatagaaatttttcatccctaaaccttaaaaatagttaatgaatacttaaaccaaataagttgatagtcgacatggtttagtgtctaaacctgataaaagtactataaaggactcagtgcacatataaacagtacatacctgcttttgttacatgtgcatctatcatgttcaattagatatccatgcttacatttaactgattgggactttcatcaaacatgatcaaaccagactattgcccatgtttatctatgtaatatccggtagtattatatatttattacatttcttatctatgattttcacagattctggtgtcttgttttgttaagacctcacattttgaagaatatctgtgtgttaaggtatgacaacttccatatttgtccagaatatctgccgtgagataagcatctcataaactataggatttctttctatttagtattactgttcaaggatttagctgatttttcatccattgaattttgaaaaataggaagctatactgttagatcttcttagagttattggccatcaccgagcccgacttgccacaccggtccgtaccctgcagaaaatatacagtgatgctgacttggagaacataccatttgcagattcgacatttggtcatggtgctgggacagtacctcaccgtccattattagtgattgaaccatcttacaagatcaatggagatgataagaaaagtcgagctgcacggccagctgttgatcaagataacaagacagctacgcaaaccaaagttgacaccaagacacacaacgtggctagaggaacccaggatgacactgagggggataacaaagttttgacacctaactctgatgcaaatggaaactctaagacagttgtgacacccaaacctgatcctgaagtgggtgaaaacaagccattgaaatcagattcaaacaaggagaacgtggaggtgccagaatctccttctaaatccaaagttactggtttggtagtggataattcagcccagaaggacgtagatgtcaaacaatccaaggttcagatcactaaaaacataaagccaaatattgactctgacaatgtagtgtcctcctcaactaacaatgctgacaaaattggtggatttaatacgaatatgccaatgaaacagcaaggggaaaagaaacctgctgcacaggctcatgcatccaggactgttctggaagagaatatagttctaggtgttgcattggagggatcaaagagaacacttcccattgatgaggagattgacaatgtgacatgtcgagaggcaaaggaaatggctgctttgcagggtggaaatggatctccaaaggcttcagatggaaatgacaagtagttattaaagcagtgagttcaacttgtttgaaagctcaatgttccaagtccagtagtacactgctttgaaccagtttcccacccctaggaagttgtatatattatcacttcatgtgtcacacaccccttttacaaaggactcgagctgtattgtcatatcatttcattatttttgctgtttcagcaatatatggagaagggctttctccaatttttcgattatactgtcaaaattgtttactgtggatttttattttactagaagataatccactaacaaatagttataaaatttggatttacacatcattcttaaagaacatcagaagcaatggattataaacacaaccttgtgtgtaaataagtgtcagttgttctgaacaaatatagtttatttttcaattataacattaaacgctcaattttgaagtggatgaaagctggcagcattggatgaaaaactctctaaattcgttgctatatattattcccgtgaccatgtgggtgtcaccagctgcgctagaaataaactcatctttgagtgagtttctaaatatgtcattgggttgcatttttcatgtgcctatgatactttccagcggtgctaatgggagtgctatacatgtatcttgtataaaaccacccttatcacgtgggttttggcaggtctaataagagatcattatggaaatttcataaaaaggcttttacaaataaccttttaaatttctctgaatttgtttggtactcttctttctcttttgggcctttcttcattttcggccccatcctcattagttggcctatcaatactttctccccaaaaacgtctttgtcctccaagacagaactaagaaggatcttaaaagggccatagtatctccggcgtagctccggtggccttttcagagttgtttggcgatagttttgaaaacgacgaaggtgaggtctcttctacgtttgtttgcttgttctcacacgcgacccatattttctttgattgtgcccaatgaaggaaaaggaaccactttgttgaaaaatctcccaccaaacacctttggtagagacactaataagggttgtaataacttagaatgtcatcaaatataacttaaacaaacagccttaagaatggcctaagtaagagaccaattgcctaagaagtagaaaccctcacaagagctggagaagacgacccttggttgtcacggattttggcctcaataaaacgtgcaagaccatggcttgatgaactgaaaatggtctatggatggcaatctcacggaggattttcgcaggtaaccctaggaggaaacagtttaatagagtttcagcgttgagcccaaacactctattagagagttgttcaaatgggtgttaatattcctgatagtcccatggtagcgaagcttgaaaagctctgcctgatggttctcataagatataggaccaaaacgtacttccaatgcccgcacaaaaaatgtcccaatatgtcagttggttattcaaatgcatccatttgaaccaattaagggcttctcccttcatataaaacgtcaacatagataaatgttgttcatagggtacctgataaaatccaaagacttggtccgcttgaaagatccaatccaacggatcctaaccctctaaaggttgaggctgaagtttaggaggttgaatgtggcatgatccagttggagtagtgccccctggtggtggaagagaagaggatgtgttgaaaacgtgatgtggtctcgcagtgtggaaatgaggggttggcattggggtatatgagttatgaggtgttggtgtatggatagcgttgtggatggtgtcatcaaaagaaatatgaaagacgaaatgggtgtggtggcgtccaccacgagggtcagttttagtgaggaggtagtaggaatagaacctactttgttcgtgagtgtatgaatgaccccttgaagtgcattgcaacaagtatccataaatgtctgcagttgatccaaatgttggtcgttatgcatttggagagctccaaaacgttagttaatgttcataacttgaaaatacaatatataacgaaaaaaaatctaaatactaggaatagaaataagaatggagttcattataggacatgttttttagatgataagatatcatgccgctactaggactcaaaccgagatgctttagcactgcttcttaagagtagtgtgtctaccaattttactatagcagcttactcaaaatcataataactaatcttagaagatctcattaagattagttattacaacatgaccaaaagtgtctaccaattttcaacctcccaactctttgagaaactgtttgagtcaaataaggccaaaagtggtggaaaacatgactcaatactatacttatacattttatcttgtaaccacattttgtttttgttttgttttctttgaaatcaaattaccaccaataaagatgaggtatcggaagtggacctcaacgttgtctttggtgaaggcaagttaaggggaggggacgaagtcaaaaatatttgtaggtgtttggtgaaggtgagttaaggtgaaaataagttgaaagcatgtggatctcataaataatttttatctcccaagtaataaaggtgaacacgacaccatgtgtgaggataagcattaatgattgttttgcccttcatttgaaaccttttgtcaattgatactaatcgattattcaattgattatttgaattgaataatagataatgctttgctggaacctgtgtgtcttaacaatagttgatatttccgtcctataattgattaaatatatctacataatcaattatgtataaaatttaaccgattaaatttggtaaaaaaaaaaaaacatgtatgttgcctagagtataacaatatttttacgactttattaggttctctcttatttcattcaaaccaaacaactttatcattttattttcactttatttttctcttaaactaaataattgaacactcaccagaaaaataaaaaacaacgaagagtctattttattttcactctatttttcttttctttatttatctcctattttcatccgctctatttttttattcataatgttggtggaagagttttcccgatcaacatttaaatatccaacaactcaagcatgatcttagtctttacacaaaaggcattttcttgaagctcctttaatatatttgaatatttgataaccctccagcccatcatcctatgatagaatgacatgttggtcagtcagtagattaaccagtaaaaaaatatacaaaaaaaataccaattcattcttttaacttatcacttattaagtgtgtacatacatattgtctcattcttaattatataaaatatgaatttatttaaacatatcttaaatattggtggattagacttacctctcttaaggatctaaataatatattcttgtgttcgtgcttaaataatgcaatgatgcatataattaagcatataaatacttgatttaagcaacgatgcatatatttatagttaagatatataaataattgatataattacaatatacaattattctaatctacacaattacataacatataatttgcattatttacactattaatatatatattttttaacaatatcattaaatgtaaaacttagcttgagaaatcaacatgattaattttactttacattcaaccaaaatatgtattctttttaatagtgaaaactagataaaaatgaaaaagaatctggcctcaattgcaatttcattcatggtcttgcacagctaatgaaagttaccccgtgcatcctttttaactaattggctgaatgccaaagacaaatgaactgatcaaagaatagccaaggaaaaagaaaaaaacttggttattgagtcagtcagtgggaaaagaaatgggaccaaatggaacacttaagattaggcttcacatcaattgttccatccacaaaataatttggatcgtttgcagatgaaaaatgaactgcagagacaattggcacaatttcatttaacaactattggaagttacttcgtttttaccaattggctgaatgcccttgacaaattcaattgactcagaaatattaaaaaaggcaatactctgttatcggtggtcaggcaaaaatgctgtcccaaatgaaacacttttgataaaccttaacataaagtattccaaccattttgaaacatccaaatttggagacccaacaatggttggcctagtgtgacgcccgtgagactcgcaaatgagggctgacaaatcacaatagttatttcataagaaaacaatgattaagaaatcaaggttcatagtaacaaaaaattattactccaaaaaaaaatgaataacactcaattccatatattataaaatattagttaagataccatacaataatgttttcctgcagtaacaccactagtatgaaaactatggtataatctgatataattgaataataaaacaataatatggctcctgttattgaattgtaaaattataaatattaatatggctgactcctgctaagaatgccatcatctgataaatacatctcccacacaatacccaactctctcaagcactcttatcaagagcatcataacaaaccccgtagctttttattttcactagatatatataatgttaaataataagacaccgaactataaaatacacaggctacatcgtgagcaataataatttaagtatactactagtcactaagcttggcacatgcaatcaggagctggatatgtatatattgattgttttggcttcctcagccttggttcgccttgtctattttggtgaccttcaaccactgcatcctgaaactctgaccactctatggttttattcaggaaaagctgacccatcaatgccatatttggccttatagtctttaagttcaagtatgtccggtgtccaacctatcatcatcatcatcaaaacattaattcaggaaaaaaaaataaaaattgtagtgatatttttggcagtgtccaaaacgagaagctttgttaacgtaatcagaattgaacagtttgagttttcttttaagtaaaactccaaatgacagattcattaatgtcatttgatgacatgggccaaaatgcactgcatgattaattcaaaacttattttggggtcaacatgaaataaatggaatggataagtctaaattgtagaataatttaattagggttcaactagtaagtccttgaactagttgggaattttcaaataagtccctacactaatttttttttaatcaagtccttgatgttgcaaaaaaaactgagttagaaccgccataaattgtgtattttcagatggtttgaagctgccaaaaactaactttagagaccttttttcagtttaggaactcgattaaaaaaacagtttagtaacctatttaaaaattctcaaatagtttaataacctccgtaacaaattaagcttaaataagagtcatccaaaaagcatctagcacaactcaccaatgcattgtgcatgtttcctggggaagcagagataaatatgtcactatgcaagccaacatagtagtcaagtgcagctagtagagaagcttttccctttatctcagaacgctcttcagatgaagcaaggctcttcttgtcttccatccgaggaaataattccctcaaagttgaaatccttgcctctccaccatagacctgaaaaatacaaccaacttcacttaaaaacaaggacaacataatcactttacaaaatacaagcactaattcagatgaataaaaagtctctactgtgtcaaaccaagcaacatgatttaccttatgagaggcaagatataaacgagtgctgttgtcaaatcccatagctgctagtaacaatccaacctcttcaggagtcattgggcaacgaccttgactcctcaactcttcatcagtgaattgagagttaagaaccctcccttgccaaatcacctgtctatactttgcaagggccagtttttcagcttttcctccaccaaaatcgcaggccgaatgggctgccatatcctgccataaaacgttttatacaccaaaattattaactgacagataaatgcatgtattaatagagcaacaatgtttcacaaataaaaggataaatgaagatgtgaacattacaaccttgtatacatagatgacctcttgaagaaattaggtgtagaaagtgtaataccttatcaaatcggaggtgtagaacaacaaatttccctgcatttttcctagcacctgcaccagtgacctcttgaaggtagttgaagcccatttcttcagctgagccttgaggatagcgaaggcggctgataagggcatctccaagtgttctgatatgagaaacaaaggttaaagcttggaagtttactttacaacgtaggtgttgaatatccacaggcaagttgtcaaaactcagtcggtgagaaaatggagagattgcagcaataccataactgcaccaaataaaacataccaatacattagaagttcatatttcagagtataccatgacggcatcagcacaatatacaccttaaactcaattacatcttcatgaataaacaaagtagtatgcaatagtccacagcaaattccagcataatcatagaatctgctattgttatactaattgaacctgaacctttaagtcatgccttaacatttacagtaacaaattcaggtagataccaacctctgtaggacaggcaaaacattctccagataccagtaggctgatgcatgcacaggtgcagccttgattctggtttctcgaatagccaagccataatactcccttgtgctccaggcgaactctttgggcaactctttaactatagaaatatcatccttcaatacatcaatgaaatgatccacatcaaatatatccatgaaggagctgcagtcaaacataagcaacctcaacatttcatcgcacacaatccatcggacaaataaatataataatggtgttgtcaattaccttgaatctcgccatacaggattcagttcaaggtatgggatcaccagagtagcattcagtatctttgcaacagcaactgcatcacatatctacacaagataatttaacactaagatcaaattgtacatctttcacacacacacacacatgagcaaacttttgatctacttaaaaggcttttaatacttacccccatcttttgttggttcaaacctccatcaagaaagacctggatatatccctctgacttctctggtaatgctgctttaattggatcacagaaagatcaaatgagctaatagatataccaaagtgacactattctcaaagctataacagcatacagcatagagtaaacaaatgatagtaatgtcactcacttggcttatttgattcaacataaggtttccatccttggctttccagaggtgaccatagttcagacaactgagatgtaggctaaacaaggagaaaataataatagaatataaaatcaacatccactgctaaacacaagccagtaaaagtcacttgaaatgtattcactgctcaattaattcttacagtttctcgttgcacagcactcctgagaagacgtgagtgcctaggtttaataggattcaattcctgcataacagtaagttgcaaggtataaggcactagaagccaataaaccaaaaaatgatgacaagtgcaggtaccaaataaaacctaggtactaggtagcatcaacataagcatgttccggagtctggttcatctctgatataagaatcattctagtggcacaagaaaccacatatcatagacattaagggactcttacaaggctagtaagcatcatgtccatgacaataaaatgcaataaattcaccaagctaacaaattcattgcgaaagaaattttcctaaagccaatatacatgataagttaaccacaaggcataacctagcattatgaaatttaattagtgtggggtgaaaacaagtaaatccttccattgcacatcgtgacgcgtaaaagaaaaatctaatattttttcactcaattgaataatttacttattttaattggatttgctaaaaattctcacacgtaacgacaaaaaatcctcacccaccgttccaaaatgaaaaacgcggtcctgaaatctgtgatctataattaatagcctctttattaggtacacaagtgtaaccaaccaaaccaagtcaattgaatctattaattagtacattaaaagttcttatttcttactactagtatctctttcaaggtgccaaaacgttcaccaaagtaggaaatctcaacgacagcaacttcaatctttttcttcttctttcttcttaaaatactaacatcaaacctcaaacacaagaatttcttaacccccccccccccaaatttgttatcaaacttcaattcctacaataaaattcagtgtgcaactcaaaaaataaccttaaaataagcaaataactaagaattaaaaaaaaaaaaaaaaaacacaccagtatctcatccatgaacagtgattaaacacaccgacagattaaaaaaagttcaagaaaaaaaaaagcactttgagaaagaaaaagaatcaaggaaaaaaatcctgttcaaccaaaatcacaaatgggaaactttccaaaaccaaaaaaatttaataacaaaaaagaagagaaaaacttaactcaccggaaacacagaagaagagaaggcatgtgtgaaagtggagaagaacacaagtgttgaaagcaacaatggaagagtgacaagtggtgttgttcctctagaaggctgaccctgattcaggtatccgagctccatcatgatgggtagaggagctcaacctcggatctgaaaaatgaccccttttgcccccagaagaagctgtgtgagtatgaagaataatgaataacaagaactactaatgtagatgaagaagaagaagaagggtcagaatgagaagagagtaaaccccatgttcataatgatggttttatatatagttaaatgtggtttggagggttgtgaagtgcagatatgtgtctgtgtttgaagggcaatagagagggagagagagtaaaggagtttacaaggacacctggcctggttcaccgaattgaataatgatgagggggtggcgtctttttcaaggggaccccaaattgataaaagggaaaaacaaagttcggatttttacgttagcaaacaaaggtgagaatcacgaagagagagggggtcacaggtgttgaatgctcatgcaattggattcagtgagtggtagatgagaccgttatagtaattcttgttgccattagcaatatcatggagtaatgctatgcagtgagtgcaagctagagcctttttcaatgggtgttgcaacaagtgttttttggtattggttaaagaagttcgaaaaagtataatatctgtgacaaatgctgacatgtattctaaaagtattgattaaaaagtttacaagtaaaaatatttttactgaaatataaaaatattctatattctcattatttatataataaataaatatttcttttaactttttattttaatgtgtgaccaccgacagcctcaaaggtaaataaaacttgcttgctagcttgggatgggatagggttgggtcctctttctttctgccttcgaatctaccttttactcccaccaatcactgaaataggaaccaaaattgagagagggttgctgttcctttttctacgtgcaaggattgtaaagcaaaacaattcaccatttttggatttatcaaaaagtggaaaagtacctctcatcactcatcagtgactaagtgagaaacaaatctacttctaaagagtagttttttgtatggacatatagtcctaatacgtcgtttttaggtgtacagttaataaaaataatatatctgtgaaataaaaacaaaaaagaaagcaatcttaaatgaaaaaaaaaatactataaggctcgtaaatctcaattaaaaatgaaaaaaagaacaaattaaacaacatattccacttttttttagagaaatatattccacttgttaatttaatgtgaatatggtatgccgtaaacaacattataatttggttagggtctcgtgcttttcttctttcttttattcttaaaaaacacaaacatgtctgttttcattacattgctttctgagcctaaatacttgtcttccttttttctgattatgagaatttctcgatctgattatattcttgatatgcttaacgtagtatttaggtaattatttagtgaattgatggccaatatatattttttaaaacctcacaccctttcaatgatttacttttatcaaaatatttattttctttttgataattgataatatataatattaaaataaaaatatattcgaactaaatttattaacgtcattttttttttggttttttcttcttctgggaagggcttcaccattggaagtggacacgagaaacacttgatttggacaagaaacaaaaaagacgaactctctactctttccattggatggttagagtgacagtcaacattaacaattcagtgtataacataaaatatataaatattgtgattcgaaaaaatccaatgcattatattgcattttaacgtattccatacggtcacccaaatatatctttgttgggacacaactgtgtttttttctacataaaataaaataataatactaacaaatacatatgtgtatatgtaggcgtgatggagaacattctaagtagcaaatttttggaattccgaaataaaaatctcatataattaaatcataatgatatttcaattaattttctaaaatataaattattaataaagtaaggaaaataatcaatccaaacaaaataatattttctaaaaagaaatatcttgttaagaataaaatctctaaaaataagaaaaagttatcaaaacaagaaaaataataataagtagttatgataaaaaaacagagtaagtaatttatgtatcgatatagaaagtatatattcacaaaataacaataaatactttataacataaattgtatctataatttattaaaataagatatatttcttctctgtttttttcaacatttgtattctccctttctgtctatgatgatttttctataactaattttattttgtattaatgtaatttatagtttaatttttattctaacttttttcatattatttccaatatgaatatgtatttccttcgttattaaaattttattgttgaatattatggaattttttttgtgtgaatttgttggttctaatttggaagatattatattttttaagtaaagattgcataaaattaattatttttctttgttttcatttatgtaaagttgctaaacaattactatatttttagaccatatatgtggtaaaaaaaaaatccaattggtcttttataacaacaagaatgagaaattataattcgttcctaattaattggatcttaaacttggtgtgttgattgtctacataaccaattgtaatagcataaaagtaaattagttatttgacacactacattataaaaaatgaaggccactatattggattgttgtttgttatgtcatagtcagtgtataaagacaattttctttattgctcgaaaaccaaatactttctccatctttaaatataactcttttttcagttttatttgttccttttaataaaactcttttcaagttatattttatattaattattttttattcaaatacattttattactttacaataaatgttatatatttaaaatataaatacattaattataaagaaaaatagacaaatatattatctcgattgaataaaaagattagcatatattaattaattaggtgtgaaagcaattaattaagtagaaaaagagatattatacatcctaatagatttaaaggtgaatttggtgtaatactactaattatatattaactaattttgttaaaggctatgaattagtgaaaaaaagtatatttaagaagtgaggaagtaatgctttacttaagcatgaaatcgattctgaagttatcttacatctatttgactgaaattactatttttttattgactaaagttaagtaatcggtgctaaaaaaatgtcaagtaatgttctaaacataaacgagtcagatatgagttcgaaaaaaactatagtgtggagaaattatctttaattggagtccaatagatctataaccagtttgtcaatatcagtatatcaataaaactaaagtaataagtatcggaaaaaaaaaaaaactaaagtaataataagtagatgacacgagttagccaatccataccgttcaataaaactataaaaataaaataaatgggttcaataacttgacaattacaaatagtcaaccaacactacgaggaactttagattactagttcaaccacaaatacgagttagacaattcatacaataacgcatttgaatgacatctaaaattaatattaaatttcaaattagacaaaatatatacaaaaatatattattataaaataatagtcattttcagagcacaaaaacgagatatatatttaaccttaaccaagacaaggatggacatgattttatctatgacaaattaagattaaggatttgaataagattaaaatacattttactattttttttttagtttttactttgtttttttttttaagaaaattactttgattagttcagatgtctttattaaattaatttaccacataatattatatcaatttatcacatagcattatattaatatatacaaaataattaagaataatacataaaaatgaacatggcatgtgcaaagacacatatatcgtactaattcatgtaatatcacacttggaaatttttttatttttttatttttggatttggtatgtaaataaagacaaactacaatctaaggaagaagactcctaaagcatcagctagcaaatgagaatgaagctgaggtgggcaattatcccataagatcataggcgaagaagatgatgaccccatcttagcaagagcatttgcgccattgttaccctctccaagagtgtgggtaaatttgatattccaatctctagatttatattctctaatcttgttgatcacaagattactagtccaaccacgaacacgagttagacaactcatacaatagtgcacttagattgaagcagaaattaggaattttcgtgaatttaaattactaattttatgtaggaaaactgacgagactacatttcacaagagcaaaataaatataatttctcacactatacagaaaagaaactctcaaattctcatttaacttaaacttggagagtatttggtaagaaaaaaattcatactctgagaatcatgtttatgaaaaaaaattggttgattgatgataaatatttctgaaaatatttatataagtattctctaaatatataagagggatcaaatcactcagaagtaattcttttacattcatatcctttattttcttaaaattaatgattataataaataattaatcttaataattatatatatatataatgaaaaagtgctgaaagccactatgtacaaacttttctgaggaaaactattacagcaaaatcagtctaaacaagattataaacccgtgcatatatactccaaagacaaaggaagtggatcctctcctgcaccaaggtgtttccaaccctctcttgtattatttaaaccgttagatctatataaatggatcggattatattcaagccatattcaaaagataactatccaattattactatagcaatatgggattatttttatgaatggatcggattatattcaagtcacattcaaaagacaactattcaattattactgtagcaaggtggaattttttttatggcggtgtttagggtccaccatgaagatttttaatagctattacattaatttaagacatacatttttattatatactttccacaccatagctctttccttgtatatattttaattttatttcatccattgcttgcctcgtttcagtattttgtgcgttgaaaaataaagggaggtcaagatctttccccatgcataaacaataatgatatcagtattactattatacttaaaatgcacgtacacgttacatcaataacgaagttatatgaatatccatatccacaattgtcaacgtagtgaattaattgtgtacaatgtttttaagttaattggcacattaatggctccatagtctatagttgtctggggagggagaaactgtaattgatctttccgttttaacaacacatcacatgcggtcaagacatttatttacccttacacaacacccaagcttctgcattctgcaatagcaacattcattgtcaagattatttctcgaaaatggaaataaaatgagtttttttgtacagatcgaagtaataataaaatgagtttaatactagtgcagagtattaaagtataaaataattctatattaccattaattaaagttattaaaataagtcaaaatttttaggtcaatttgatccactgtgggtttgggtcgggatggattaattttttttatgtttctagtaatagtaaaaaatttgtttgcccattagattgaacttgtgatgaatcaggatgacatgcaagtttgcctctatacttgtacccttttagttagaatgtgatcaattttaaacagttaagtctttattttgtgttatgcattctagattaaagggttgtatacccttcagtcgaccttgggttgaacatttaaacctcctaaagattgcttcgtatccatatataaccgcattattatcacatcttaatataatcttattataactttatgctaataatgataagattggggttggcgatgcctatacaatggacactggacatagaggcacaatataatacactttatgctctgggtagataacctcgatctaatctaatggaagaaatcctattccgaaagagttacataaaggattcaacatatgaacattgagtcggtccaatgattgatacttcgataaattaagtatttgaccttgaacaaaattgtccaaccaatctacaatataatttttttaacataattttcatgtggacttctgaactttattaagtacttttgaagttttttatagataatcttcgaatgctttattgtttctagatttttttgctcttaaatacataataattaaaatttaaaagaacaaaacaaattaattatttattaaaattttagatttacgacaccatttttttatccataaaaattaaaaacatatatcaaaatttataataattcatatatcttaaaaaaaatcatttaatactatgagatattaattagcttgtacgaaccaataaattcttagatttattttaattataccacattaacacttaacatgcatgatgttaggtgactttaaatagattttggaaaatactatattactatgtcagtatctgattttacgtacgttgggtattgacatcctcacaaaatattaatcgtgtaacattagataatcaagattgagtcacgactcacgactgtattacttaaaaaacatttattataagtactttatatataataaatggtcagaaaaaaaaaactattaaatggagtgtctaaaaattaatatcaactaatcaaaactttccccaattttaaaaaactttaaaagaggtcccgtgatctcgctacacatggtgcatccacatccacatccactatatataattttttgttcattattatccttatattatataacaaaacatcgatcaaagccaatctatactataactttgtccaaaaggaccaaaacccattcatggttgtactgggcgagtaaaagacgtactagtatgtatgtatatgaatcttaaattatcgactttaacacattaaattattattttgattattattttttaaaaggaaaataagaatatactataaaacactttgatgtattattaacataatataattgcttgtaaaaaaaacataatatagttaagcctaattgaaaaacactttagaagatcacaagaaatgttgtcaattccatttcaacctcacaataagaattttcctgctttatttgagctcgtctatgggaacttagttctcacgggaatcaatccctcctattattgcgaatgtcaaattattcggtaaattcacagctgaaaaaaaaaacaaaactattcgttaaacttggattcgtttagaatccgcggacgcgagggacgtacgcgcctaaaatgccgatgccgacaaatgcattgttcctacaatttataaaataatattaaataataaaactaagtaatacatcctttactttttcactgttaattttttctaccattcctatgttatgtttctatcttcgtcaatatatatatttttttttgttgtgttgtagctgattgataaggtataggtaccaatttaattgagatcttttgcatgctagcttttgcgtaaaataacaaataagggcaatattattatcgtgtagaatgaattaaagaacgaaattttcacctgatatgtatactagtaagtatagttaagacagttttttttttaaaagtaagaaacacacatatataagagaattgtcttgttacaataaattgtttaatttaattgattaataaaatatgatttgtttatcttattaattttttatcctatcatgttagtgaagtactgaagtgtattttttattatgataaaagatcaagttaaaagcaacaagatattagataggattgttactctccctaattaaccgtaataatcattatcattaggagatataagattgatttgatgattaaaaaataagaaaagggaaaaaaagatcccgagttcaacccgtttactaataaaaactaacaaactgacaatcaatatttgtcaataaaaaacacaaccaccactaccactagtgtcacactctcaccattgtcatcactacttcaattgtcatcactgtcataataattactacgatcgccgttgtcacaactcccaccattttcatcatcgttgttatcttcatcaccactaaccattgtcagtatcatcaacaccttcattgccaccattccataaccattattgatgtcattgtcacgatttctgtcaccacaaccattgtcatcatgtcgcaaccaccattatcattttcctcgttgttagtattgtcactactatcaatattgtgttgtcgtctccaactactaccacccgtcattatataatatgtataatggtgtgcaccaaatatttgataactttaaaagcttatcagtctgacccttattttgtcatgttcttgttctattcttatatcctatcatatcataatcaccaaacgaacccttaggatgcgcttgattcgctaaaaaaataaaagattggacaaaaatatttgtccaacattcaatttaaaaaatgattgagggataatataaaataaagaatgatggactgcacaaataccaaaaaacttgtaactcactaaacttcgtacaacttttagttcagtgtctaacaaaagtaaaaatataatattgttcttattttctgacttctcatcatcctataccttttttttttctttttccatatgcaccttcttctctaaacctccctctctaaacgtcgttccttggcttttagtgtggacaccttggccgccagcaaaggccatacagactgatgttattccctttttgttcattatttctttctttttgttgttaatttatttaaatgttaattcccatcatcatctttctccttctcgctatgttttttttttcttttggccaactccaacaagaccgtattgcattgccatgttgtagttgccatcgttgtgatcttgtggtggtcgcgctgccctgccctgtgcccgatggtgtcaggggccacacctcctccgtggaggtgtctctgatggtgtcaatgtgctactaatgcaactaggattttataggaaaatttatattttttttgtccattacataagcacatcaaacaagataaacacaagattacttataccatgcgttgatcaccaaacaacgtataatacaaaaagttatcttgtaactcaactacttatgtagtgttgttttatttgtcatgtctttttaacaaattaaatacacccttaatgacgacttaaaaaagtcaagtattttttattttatttttaaattatacacgtttaatatatatatatatatatataaagttttttattgtataaatacatctcaattattttttaattgttagtaagatattggatattccatacatcttgattacttgattcataattacaatttctatttgaagcttttattttttatttttatttttgctgaaatttgaagcttttattcttttatcgtttattttaatcagccaaaaaaaacataatattatataatgaggtacgacctcccttttacaactgtatccatcaaatttcctttccagaaaaaaaaaccccaccaaaatatagagtacagatgttctttttaagaggattacagatgttataaattatttaatattttaccctatgatttggttaattaacattaaaggcggttaaacaagagcttaattgtttaatttttacttttaaaattttaaattataataattattatacacactattgattatcaacttatcgatgatttgagtaaaattagatttatatctcttaagcaagattcaattggaatgagtaattagctaattttttgacaaataacacagtctttaaaatagtaaatactttacggtaataagtcaataagactgcaaccccaagaatacacaatattgattagcatacaacgagtaaatcagtgatcacacgcaaattgaatgcaaatagtcaaattaaaaaaaaaataccacaaaacattatgattgaattgaagtcacttttaatttgattcgcccatgcaaggacgaggattatcctagtagaaaaaatcgtgtggtacggaatatcgatcgatattatataaaagaaatggaatgttgtgcgttttctttttgtttgtggaagatcttcatgacatgcatgatatcgtccctgtccacaaaacaaaactataacgttaatgggtcctgtttgtaggactagagagtgaatgagagtgagagatagcagtgataattagttgtcgtaatcaggattctggaggttgatgggtcaatttgttgcaagctgtgtcccttggtagctatactttacatcatattcactttatattcaattcaataccgcgtttgtggtacagtgctaaactatcaataaataatatattaaagctaaattcaacaaattttgtgtcaataatttactgtactattctcatttaaaatatgttaaataacttaactaataacaaataatatattattaatttgagcaattaaaattaagtcagatatacaaaatccacttaaaccgtatcaaatttacatgaataaaaaaaggctggtggaataacaaaaacagcatgaacaggagttactctaccttataatttataaacattaaaaatacattaccggccataaagcacacatatttaattcttatggttatcgcaggttgcatggcatcctaattctagttatggctttgagtatataataaattgtgttgagaaaaaaatatttatttatcttgtatgtatttatggttttcgataaaaattaatccgtatttttaagtgaaaattatttcatttcaatattataaaaataaaaaaaattcacatactaagtcttccttatgatctatcatgtgtttaatgattttggaattggaataacattctctcccctcaattaaattcaaaagaaaataacaactcgaatatctttttttttcctatttttgagaaaactttcttggaatatcttattgtggcaggcataggttgtcgtctaattaatcattattatcaaatgaacaactgaagaagaaaaactatccattagcgacatcataattcgtcctactattatgtttaaatcttaatcaagttgaaactgaattaatttgtaagagtttccaacgataatggatttctttttggtatatcaaacctcgtgcttaactaagaatggatcaagtgtaaggactcggctttcccttaatctggattaggggtcgatatcgttttcttttcccctaaataatgtatcttatatgttcgattcattttgataccgggggaaacaaaatgcgtatataatctgctcacgaaaatcattttcataagatatgaacttgtttcattatcccacacaggcaaaattgtttattagtaactcaccttttgttgggcgacagataatagatttatattaggcaagtttaagcttttaaagatttgctgagtggctgttgaaataacttgaattagaaatataatacttatgtttggataattttttccataaatatttatagaaaataataagtaaaataaaataaaataaacttttaagttaattaatttgtaaaaactttcttatttaacttcttcaaaggtttttttttaacttatacataattaagttaattttaatttttattggaggactttatttcattattttttttaacaaatgtgaaaaaatgtacacataccttctgaaccccctgaagtccacttagacatggcaacgggatgggatgggaacgagtattgtctccctgatagcctaccccgacttccaacatatacccgtatgcgtgcccgatgcccgacacgttaaaattaaaatttgtcacctcatccctatacctggttggtaacggatatcttgtccccgtctcgttcccggttcagatttgtaaaaaagtttttttataaaaaattatattgaaaatctaattaaaaaaaattgattgttacatatttatttttaactacttgtatttgcagtacatttgtctacaaaaatcatcaaagaaagaatcttaaattatgtaaaaattataaaaaaaattaacaagtaattaataaaattttaataatttcatcatctaagcgggtacggaaatgagtatgggacgggtagtgacatccatgtcttcaaccccgactccgattaaaaaagtaggataatccctatgtctagtcaattcggatatttcacatcaaaatcaaaacagatttgaacggatacccacaaatacgagtttcattgacatgcctaaattcacttatgaatcaaattaattttcttgcatccaatactaagataaatagatgctcataaatacatgtatccatcaacatatctaatgccagactttctttcttcttcttgtatgacgatttatatcaattaattataatttatcatgcaaacacacattcattaacatatctttacattccacaataattagttgcaacttgatttctgttcacggattaacccatgattaccgcgatgtactcctgcttctgatgaagtaccaacccacgaggagaacgatagactcgggtgacagagtttcctaactttagcataatagttttggtctaatatatacatatatcgataataaagatcacctaatacatagatgaactaatttgagattattttaacttaaccaaaggtctttataaatataaataataaggactatcaaacatatggattaactaatatgagattgttttaacttaatcaaagatcttaagtttgagttctggttatgtaactatgttaaatatttagagagaaagttttgttgttaataatgattctatgaaatttgatcataattgttttcaataataaatacttaccttcaatataatatatgaaaaaaaaaaatagacaatgagtgactcggggaaagcaactgagggcaacgagcatgggaacattgaaggaacattcacatcatcgcatgcttgagctaatgttactagtacaagtttttgcaactgggatgcaacttctatcggggtcatattggttgtctttgtactcattgcctatatcgtcatattaatgctgtcattttgttatcccctttgcactctacttcgaaagaggccagacaaagaagattcacatggaaagtttggttttggctttttattaatgtattaactaggatcactatggctcgaggattgttttattatggtttcagctacttactcagccaactgtctcaacttgattcctttatgcactttccttacctctatcacatgtagaatggagacattggagttgcaaacatgggcagctaaagcaaagtttaatttgtaggggcaattttgtgtgttgggggagcattagttactagtctttacaaagggaaggaattttatcttggtcatcgtagtcatttcaagaatgttgttgtgtctcacaaaactaacatgcttcggggcactttctttttggtttgttgttgcttctcatacacagcttggtttattgctcaagttgattgaagtatttccaatgaggtattgtggggaacaatgctagctagtatgcattacggtagcaatccaatgatcagcaatacttggtgcaatcatagattctagtaaagctgcttgaaaattagaatggaatctacaattggtcactataatgtattcgggagcaatggcctcggttgctacattatgcttaatattgtggacaattagagtcaaaggacctacttatcctccaatgttcaatccacttgttcttatttttgtggccttatattattagaagctatcttacttgaagagccattgggagttggaacgttgttgggcttggttttgatcatagaggaattgtattcctttttgtggggcaaaaagagtgagacacagcacaatgtagcagctgctaaagaatcaatgggatcgtaccattactatcttcttgaacgcgaggatatgaggcactcttaaggatcagaacgtgtctagtctttatcttaactagttatttgaattttcagtttgatagatttcaattacagcaccttctgcattgaaaaattgtgatatttgaagtaataattatatcacacaatatatgattctcaatatttcgctatgatagtagatcaccccttataccggagagtctcttttccttttttgtgcgagatagttgcaagtgtatgttgtcttgagagttgagatacagttgtcagtgtctgtataagctgcatgtatctcgaacatgggtgtgtgaactagtgtccttggagaggttgagctcttaggcttggatgatttggacacgctagctattgttcccaatacactgtattcttaaaacattttgaacattttatggatatacattaagtacaaaaataagggtgcaagtgtgtgagcatttgtgcatactacagccacacaatttataaattaacttcttgatcaacttttgaaattcgaatcatgctttacactaatttattagtgatgacgggagattcatccaaaagaaaaaatgtgtgtgtataagagattctttggaattaaagtttgtataagagacttcaaataatttgattagactataaaatttaaacttcattatcttctttgtaaaaataaaaaatatcttttagtttatcttcattgtagtcacaatttagaaattaaaataaaagaataaactaagtgcatctttgatttacagttgaaactgttacaacacttgttttaatataaatctaacgaataaaaataaaatgaatgtaaaatcaaagatcctgaatacatgcttaaaattcaggtgcaaaaatatatgagccaaaagtacttttacaaaaagatcataactcttacttttacttttatatgttggattacatttgaatgcatgttgcagtaattttaactaaaaactaaatatgcattcattcgttggcaaaatattttgcttcaaatgtaattttgcaacaatggacttccaaaaacttgtaaataaaagtatatcattattttcttcttccattttgaggtcgcccaacttcgaaagtcatatattactagccaaatacaaaaagtagcttgaggagttgaacaacccaagtcgaccttggaccaaatctcagaaacatataagcattacatacttctctcttccctgcttgataatcaacagttcaacacctcagttatcatttaacattcatcttttccattctttgatttacactcttcacattcacatttctcaatggcgggttttttctcccttctcagacgcctctacctcaccgcctacaacttcaccttcttcgttggatggtaatataatactcactctcaatttctcttatctaccaacacattcagaattttctccttcaccaccaacctccttgtttctgaatgtaactgctcaagtttgccgatttacacaagcctttgctttttgcccaaaccgcggctgtgcttgaggtactttggtccaaaaataactgttttttattaactgtggagatacccttttgtttgtttgattggaaaatgtccaagttttcttgtgggaattaacttaagtttcaattttatttcatgcggttttatgcgtggcatgctagattcttcatggtatagtaggtgagtaagcctttgctcattgtcatttctaagggttgataaaaatggggattaagtataaacgaagtttacatctatttccttatatcgtttttatgatttgaatttctcgaatcaaattataacaattgaacattagtattattttttatgtaaaaattcgcaagatattcttaatagagtctacttaatacagaaaaaaattcatatgtcagaacttgatggcacattggctatagtataaggaacttcatctttgtacaaatcaattaatgttaatatctgtttgattatggactttctctcctttttcttacccctatgacaaagggctggtgcggtctccagtaacagcaacctttccacagataggttcgaggttgttcctggcttggggtatcttgtgcttgttacctccctatcaatcagctggtctatcaccgaggcaagtttttcatgattgcttgcttgctgttgtgtttgcatcttgtcacgttttttcatttctatttgtctgtttatgtattttaattttaactatcataatggaaaatgaaactgcaaaaaccacataaagttattactttgcattaaacgaaactgccagagaagggtggtgttcatcagaaaggagaggaggacagtagtaggtccaacttcataacagagagtgcacaagtgattgagaacagctgctacttcaaactgtgatgctatttaatttttgtagcatcgtagcatgctccagtcactcagtgatgtgattccgagatagtgccactatttggcactactgacaactatgcaatctaggaaaatatggagaacaaataaccaaatttagggatatgtttttttagtcattgaaatttaaaaatgtttttttagttctgaattttgttaatttactttttttagtcttaaacacactaaattaaaattgtgacaatttttaacactttgtgactgtaatttagtattatgtcaagttttaaaatacaaattcaagctgttaaaaaataaaaattaatttatgaaaattaaaaactattacaaattatcaatttattatactagagattaaaagagcaatatgtcaaaattcaagaacaaaaaaaaatttaagttttgggactaaaaaaagatacacatcccaaattcaaagattaaaacaataattaaaccttgtttaaatcttgttttaataataaagattaatttttatatttattttaagatttattgaaactagtttggtaagaaaatgaattgattttctgaattaaataataatactgattcattttgaatttgtattttaaaactgtcacaaaatactaaaaaaaatctccacaaaatgctaaaaattgacataaaagtattaatatattatgttaggaattaaagaaataatttgtcaaaatccaggaactaaaaaaaatatttttaaattttagagactaaaataatcacaccctaaatttaaagattaaaatagtaattaagcttatgataaatcattatcagttttagattccataaaaaataaataaaaatgttcaccatcgataccaaagaaataatttgatcatttgttaaaattattcacacatacacacacacaagaaatgcctgttagatggtacaatatgagttattttgatgtaattaacttggttatggtccagtcctcatgagattttggatcagtttcgccattgtcttgtacatgaatgaaaaatttcaagcacgccacatctcaaacagctccttatgggaagattttaaagcttccatatcatttgctagtacttaacgaatcagaagaaagcattcaacttcatcagcttgacagagaagaccataagaaagacattttattgaagatcattgattcctggaccagagaaaatattacttagcttcagacctttcctttttgtagtatacatagcaggcatatacgaccatgaaactcaattggcataatgcgcgcgttgatgagaaagtgaaccaaattaccattaatttgacatcttgaactgttgaagcatataaattaaatagcaaggtagaaaacaatattagtatagtactgaaggcaaccagtgtgagacaatcttaaatctgttttatttttttaattttaatcttaaataagttcctaactataacgaaaacaaataatgaaatctactgtttattcagatttttcagtaggtctaattcttgagtacccaaatccagtaaagaagaggaagattgctttttagatttcaagccaaaagactgagcttaggtgaaccgtgaaccagagttctctaacattgaactaagaccacaatatctcaattaggctcaacaattatcttttctctccaattttaaggaacaatgatacttcacgacaagaacaaaaaatattaaccgaataaaagtttaagaatgacgggtcagttttttatttagaaactaaaaatgaaatttgaaaataaattagagaccaaaaacatttaatcatatattttaattactaaaagaaatataatcccttattattttaatatggatttatgattatattaatgttagtttacaaattaatcacaactagataattaaattttattttatatttttaattaatcatcaaattaaaataataaacaaacatagttgacaagttaaaaattaatttaatttgaatttgatatctatactaataaatataatatctatctatatctattataacgacaattactaatttactcccaactacttcttttattactacctatccagtaaaaaaaaaagcaaaaataaaataaaataaaaaatattaccactctcaaaatgtaaacaacattggttatctcattatcacatgaacctcatttgtctctagtataataataaaaagaatattctatatatttagtgttcacatttcattagatattttgcttttaaacttttaagtttttcttctaatctacaataactttccactatttttataataactttccactgtttctatattattattattttattctgtcactttttatttactatatttaacttctatttttcattattatttaaaaaatttagaaagatatttcttctccttgttatatatataaattgaatcacatgaaatcatgttatttttacatttattttaaattttgcctaaacatttaaccatgtcaaaccaaaaacctactccaaaatacaaagttttaaggagaattgatataaagtatcaaaactctatgtcttcattctggtctatactaaagacatgtttggagaggaccaagggagctcgagtttgctcattcttaacacattaatttatgcactatttggtgaacatattatttgtataaatacttataagaataaataattaatatttttaaacttaaaataaacttattcattttaacatttagaaagatttttattcgtctctaaaagctgaaatacatacataattttaatttatgaaaagaatttagttcattatatttcatttattttcctataaatactaataaaaaaatgtctaaagcctaaaatacttttactcgtgtaaggcagagatgcaaggattacactagctaaaaaagtccaattaaaaacataactcgaattgctttctttttaaaaaacaattaattctgaatgacattagagtaccccataacataagtccttactatttactaatatttatactacctatacacaccacggggacatactagagacataatcattaatgaaatttagaccataatcttgtgcacttttgcttgagttaattttatctcctcacacactttctcatcagccggagtatggtagcctgcaagtaattaatcaaaacttaaattaagtaaagataaataaacataataaggtagcctgcgagagtaatccagcaaaacagatttttgtcgctagcaatttcagagttcacaaacagaaagttttcaacccattttgccaagactttaaaattcactgtaagtataaaataattgtatacattaatgacaaatcatattaaaaataacttttatgatatttattataaaaatctaaaaaaaatcatacataacaattttttataggttgacaatataaatatcagtatacatatactattgcttcttttacaaaaatgattttttttttctgattgctaacaaaacatacactattttttggtaaacacaacatacactgtattattatctttagtgcactgcactgatatgccagaatgtacaataaattcgactataggttgacaatataaatatcagtatacatatactattgtttctcttttacaaaaatgattttttttttctgattgctaacaaaacatacactattttttggtaaacaaaacatacactatattattatctttagtgcactgcactgatatgccagaatgtagaataaattcgactatagtttattttgtggtaaagtgaatgaagactcaccccaatttgagcgaagtatctgagctttcatagtcttgggggagtccagtggaattgcaaacgtacgtgacagactccgaagactgaccttcatccataacaaagttctcagattcggcaccaccatgcctttgaccattaattatccccgccacctttggtacaacacatagatatatatattatacagcttaattttatattatatgctttcataattgcataatagataagtcagattcagggataagtttgcttaagaaaaaaaaaacgcacacacccaaataaaattagagagaaaaataaaaagaatatcatacgtgacgtttgagtcgctcgttctcttccatcaatagcatcccctgcattcaattggagtttgttagtttatttataggaaagaaaataaaacttaataagacatggagataataatcatgattaattgacaatctaatgatttcatgaattactaccaatgtttttgtatttcataaaatacgagatcggtgtttcaagtcatatccaggaatccaggaccaatgcaagaatatttagtactcatatgtatcatcattaattggtggattttcaaataatggcaacagaatgtctagtttctaacctttctttggagatcagcgatctcactcataatcttctctccctgaaaagcaaaatgatttcataatatagagtcatcatgaggcaaaatattatgctatggtgagcactacataaaatacaactatattataagaccttcttttctattatacggcccaatccagtttcaagtgacatctccaattgttgcaattcttctatgtttaagccttgaagatcctctcctctcagctgcctgtattattttcattgttataactttgcatttcaacaaacaaaactatatcagttataattataccttagttgatggctcttttcggcaacttccttgctcaatctggagcagttgctgttttcaactagctgcagtaaaacatttaagaaattaaggattgccattaaattttcacttcttattttgaacgcatattgcaatatgaagaatagtaacttcatttaatttacaaaagccaggtcacacctttattattagtttttatactagaaaaagtataactttagtttttgataaatttgtcttaatatttttttttagatttgttgtacaattattaaatttattgattaataaaaatttattttacaggtattttaatagtaattcaatacagaatattattttcggatgtaccataaaacaatccaatagtaccgaatccaacctgcaactcgagagatggttgctccatccttgctagattctttgagtgcaaatgatgcctttcaagtatttccttcatgcttcataagacaatatcaaagtcacattatggagaaaacccacaagaaaaaaaataaaagtacatacaatatactatatatatatatatatatatatatatatatatatattgtagttaataaaacaacatcaagtatatatagggtaggagaattttgatttcgctcatgtcttggacttcattgaagtttgctcatgtctatcaatttcagattgtagataggttatatacccatacatgttgcatttgctgattaaagaaaaactttaatgcttttaatatgtcccacttagtttacccaacttaactgcccaaaggtattctacaaattaaagatgtgaaacacttgatttcaacaaaaatatgattaaagtggggggttagtaggaacacacatgagcgaaaccaaaattaaaaattaatcaaatcatcaaatatgaaggaggctagacatcatgatgtattcactccaacacatatatgctgtttaatttgtgaatcctgattttgtgaactacgggggaaaaggtaaagaaaagatgagctgtattgaccaaatataggacgctctgagaatttccaaaggataaaagttttcttttcacgtccctaccctacccaactattatgggttgctaatattcccatatatgtagacctcaaaatctaaacggccgtgtgacattgtacaagaacaaaccaattattgtttgactatttttttttttagaaaaagaagctgaggcaaatatattttttgaaaaataaaaataacaagcttaattattataaaaagaaaagtaaatagtttttttggagaaaaaaataactgaaggaacttaaaaaatagcttgacttatctccctccctgatcccactctttaattcttttctttttgtctctccattctctcctcccatttcctctttctcaggacatcactaatatttataagttaaaatgaaatttaaaaaaattgtcaaacaatttttattttatttttaaaaactctttttgaagtttaaattttaaaatagcttttgtaccacccacactatggctcaatcggatcattccacaaccgattgaaatacactcaacaacggagtgactccccctccataacactaatagatcactagtgtaaaattaactagggcatcttcatagatcttgattgaggggctctcttggagtttgaaataagcatccctggaagacttgtaattaagaacaacttttaagcagaaaaaaaaaataaaaaacaaacatggtcttaatatatctaaccaatttatttaacatcaagcgacattataaataacttttcatctattcttcccattttccacaagctctaactatctttaaggcatttatactactcacttaagcaatttactttgggttttcaactgagtccaaagttataatatggaatgtataatagttgctgtatgttctctcaaacgatccaagtaacattgattaaggttcctcaccgaaacattttttttttcagattgcctagaaacgtaaataaacaaatccagttacttgaagcctaacacagttacaccttttgaaagcaagaagcctctctagatcatgaatgaagataattaaagtgtcaaaatggctaaatgaaatgaatataataaatgtcataaaccagggttgatggtgacatgtactacctcatcaagtttccatggcacttatggcttcgttctttcatggttaccacttaccagttacaacctggattgttaatggtggtgaattcattctcataaaggttaaccccttttgaccacaaatatatatgacgatagaaaaccgagggggagaaggaatattgtataacatacttagcttttatacttcgctgctttttgtctatccaaagagaaaaacaacacaagaaatagatagaactgactctatatgtacatgtgctattaaatttatatagcttgatatatatagttaacaaaattttgcatagaactgaaaatgtttagattattttgtacattgcaatttatgttggggttatataacagatttatactagttttctgatcggagatagggctaggtctgtccaaactaaataattcttctttataagattgatctagtgacttattttatctccttcacaattatgacgtttgattctgtgcctttttcagactgattgtgggccggattatataggataactgatttttctttactatgatctgaacacctataaaactcaaaccaactgtaatgtatcaaacaaattggtgcatcaaataagcaacatagcatcaactcatcatgtacacaatcctatacatgttctatatgttcatgttttagacattgtcatcaactcatcattttctttcttcatctacccacgcgaaactcgcaaacactaaatgaagctataaaactactagaacaaggaagcaaaggataaattccaaacagtaaacagaaacagacaacaaaagtggcgagttggtaaccgtgcttgaagccaaacgcacacaaatgtcttggaagcaattatataacaacattacaaccatgaaagcatgaaacatctcagaagtcagatcagaactctcattaactcagttttcaaaacaatgtcgtgttcttttttcttctttttttattttttattgaccggataaaaataaaaacgccttatttaatatttaataaaagataaaaattaaagctcactatccgtaccaacagaaccaacttgagcatataccaccatgcttagtacgcaaccaatgacttcatgtagctaagctgtcttaataattctcattatgcaaaccataaagacatagatcttatcataacccccaaaaaataaaatccaaaaataaaaccactgaaaccccatcaacccttttgagaaatagataccgagaaaagaaagagaagttacagaaaaatacctcgagcttgagtactcaaagagtttcccagtggaagagaagattatgagggcaacatcagcatcacacagaaccgaaagctcctcagctttcttgaagagccctctgcgacgcttggagaacgtgacctgcctcgcggtggcgttgtcgatcttcttaatctgaatcttctccctcgccatgagcactaccctttcaccttaatctatcctcatttggataaacaggaaaaacagaaaaagaaagtaaacagctttagcctctttaattagtggggcaagtgagttatatcttatatctgatatgcagaacgaaccagcatacaatcgaagaaacccacctaaaaaaaaaccaaaggaaggctgagtcgttgactatttatggaagttcttatgaaaagcaaaaagcaaagggtggtgtttttgtttagtgtgagagggacatgtggtgcatatatagcagaaaaatttaatatgcaggtgtttaactaaatttagcttttgtgaaatcaaagcttcgcttgcagatcatgggagaaggtgtatgagggaaattttttaaattttttttttgagtgatgttggggatagaagagatggagttggtggtggggtgttgttaaaacttgaaagagagagttttagtagcggagcaaggaatttatcgctgaatgtacttgtggattttactttccttatcggggggaaggcgtacgttgatattaggaattttggttttggtgctgtttggtttggcttgtttagatggttccagctttggggttgaaagccacaaaccaatgaagggaagagagagaaggagagcgtgtggaagtgtggaaaaggtatacccttttatggcgaaacactgttttggctcatctcccaaaggtgttacttctaaattaatcaataatggaatgagttgagcattctttttaagatacttttcttttgctattaaatagttttttttaatatagaaatacattataaaaagggtcttacaaatatactagtgttaaatagatttttttataaaagggataaacaaaaacaatactatataggaagtaaaacttgtgttattacaatataacacgccaattttatttaataacgaaattgtgttgtgaaaatatataaatatttattagtgttgggtagactaatttattcacctaaggagaatcaaaatttgaagtttatttttggtttctcttataaaaatatataatataaaattatatatatatatatatatatataataagtataatattatggttaaggtgggttaacgaagttttacttaattactaaaataaatccaaccaacgaccaaaaagttaaaaattataatattatttttttattacacttttttttactcatgagacttatttttatgtgatttttattatatatataaatttttggtttcaatatcaatccaatttcataatttttatgtaagtgataaaatataataaaacaagtttcactctcgaattaaaaaaaataaattaaattatgtatcaaaattaaaatgatcatatttgggaaggttaattttgactcacattaaaaataaaagaaaataaattaaactttttaaaagataaaagatgaaactaaatataattaaaaaaacataaaagaactaaaagtatattttagactaaaaattaatgaaacaatttgatctaacaaaaatactttaagggacgaactaaaaacaaatagataatagaccaaaaattattttacccaaaatataagattgtttttaaataaattatatgaaaccattttagatgaatgtatatttaattattaagctatataattatttatttttataaataaataggaagaaagaaaaaagttatttatataaaattaatattttaatttctacaaatgtaagaacaaatattatttgagtgaaatttgccatttgttcctaaaattatgtgcattatcataatagtctataactttttaaaaaatatcaaataaaaattcccaatattatatcttaataatcaagttaattagtccttgtcattagtcaaaccctaactttattactaaagatgtaaaaatgtaatgtaacacgataattgctattttggcagtaatctatcatgccacctggaggcacaataaaggacacatcattagggactcaaatgtcaaaaattgggtccaaaatgacaatgaactaaatgataagtaaaagatgaataattaatgatccccttttaagccttgatcacttaactcatggcctttaaggacacatcaatcattattttacaagtcatttcctaagctttttttttttgtgcaaagtgaaaggtgagttgaattcgttatgtgttttatggtatgattttttgtgtgtttttcctattgaggtgtgattttcaccggcacaggttttcatttcctgatgaaacgggatttgtggttttgtttgataattgatgtttgtggagattgacaaagtagatgaaatgtcatgttattatggtgaagtagagatgaaatgtggatgttacaatgagacccttattaggtcttgtgggtgttgttatatcacgcttatggtgttcttgtgtttttattttttttaacacatttgtttattattttggcaatgtgccatattgtgtgaagaatcatacctgcgttgaaccttgaaggtaggtttgtcaaaaaggacagtggtaagttagagtatacagacaatgagattgatgtgtgacaaaggacatgaatacaataacctcctttctcttttctctatattttgatagatttaaatcataaccattctaccattatagcaaaatcataagttagtaccgtcaaatcttgaattccacttccaaacatgacacttatggctttttttttgtttcttgcttgggtcaatggatattcattaaaaaatataggagtgtgtgaaaatatgaaggaaaatagaagggattcgaaaatgtgaaaaatgaaagtatatatttaatattgacaaaaagtgacaagtaagaaagataaagttagcattaagagaccctccaatttttatttccatccctcatgatattttccttaattcactgtcatcttggtcctaatttttgtcatttaattaggccttaatgatgtgtcctttgctgtgcatcttggtggcatcacacatgttgtcaaagttgcagaacattcgactaatgaccggaactaattaaactaacagcattcaaatttaagaatttatatatttatttttaattttaaggactattatgacaacactttacaatttcaaaaacaaattgatagtttattcaatattattttatatactattatttaattatataatttaaataaattaaattaatataaaatatataattttaatgaaatttaaaataacattgtaactataacaacaatataataaaaataataataatttttagaacttgaactaaaacaatttaaatttaaatttaaaaataataaaaataataaatttaatttaacatttaaaaagtattatatttaaaataaaataatttaatttatatttgaacataataggaataatgatttaaatttaataatattataaaatcataaaaactaatatttttttcattaattgcgtgtgaaaattaatatttaacgagagaaaatgaaaatacaaaaaagtgagttgattgaaaggacgtgatcagaagtaaaaatgtcacttttcaaaatgaatatttaatttataatattagagtgtatgaaattattttagttttctgcaacttaaaaaagaaaaaacagaattgataaaagctttattttggtgagtatattaatttaaataactttttttggattgatgaaacaggcagagaatcgtgaggcccaaggctcaggcaaatcattcatcataatatattactttttaacggaaaaaatggctttccgtacatgaaaatactattagcataatggaatagcaacagggttaggggccatcttgggtcacacgatgaatgacaagtgactccacgatattctattctatcgtcatctgcacttcatgccattgatttggcagatcgatccttattttccattaggtcttaaactattttttaattagatcttagacttgtatttactttttaataacttttaatcatttttacataaaattaattgtctcagttatgcgtatttgtaacaaattgataatgttggctgtgaagtcttgatagacttgtgaaaaaattattggattgaatagatttctataagtgataatatagaatgaagaacccacttgagaataccgatgggttcgtaacatgcaaacttgagaatatcagcctaaaaagataataatattgacctaattaaaaatgtaagaatgtttaatgcaggcctacaaagatgttagtattgaattcaataactaattaggtatttatgcaaggactgaattaaaagaaagaaaaaaacaatagttcagaaacttaattaattaaaaattatcaaatattcaaacacctacggaataataataataattactattattattattataacttagtttgataaactaataaatggacactgtatgtttactgtactactagaactacgaaagcactattactagttaccgggagatctagcatgtgattaaaggaggaaagtacacaagcagagcgtgtctttacagatgcagtttttgatgtgcctacacgcatttattatatatatatatatatattataggagagatgagagattaaatcaaaataaaaagtctaaatttaattattaatattaaatatatgtgtatttaatattgattctatcgcactcatttaatattaataattaaaattatattacattaatctgaattatttattttaatttaagaattattatttaattttttcacatcttataataaaacattcatctcacttaatatgtccttatatatacagagatttatttattttaataataatttttttagagttactttttatttattttcttaaaatttagtacttaattatcagattcaaaaatcgaatggtgataaaaataaaaaatatctttaaaaatttattggaataagtggattctcttgcgtgtgtgtatatattatcttactttttaacatttcatttgagttattgagtttgtatatataaaacatgtctttttagtttacgctttgaatttctcctagagtcctaatctacattgtaccaaaaatcactgtatctgatactggcactggcctatggataagtaatgaagttattataggtcaaatgacatgtttttcttctgagttaaaaaaaaaactattttttgttttactgagactgatacgatgcatcttataattctgctagatcagaggtgaacaatggattgtatatcgtttaatgatttagttctctgtgtaatagtaggttgcttctgcagagtgaaaggtatcagagcaccagtacttgacctaatgccctcctttgctatattcactcataactcattctaatgtcctcctttgaattatgaaaccgtctttcgagaaaatgtttggttttttggtttggccatttggggtctttaaaattttgaaaaataaaattagtttggtgatatatttagttatctttaaaaatatatttattttttaaaattatatccgaaaactcaattttgtaaaaatatgatttagattgttttgacaaaagctgtatttgaatttctggtagctccttccatttgtgtccaatatttatttccagaaagtagtatctttcttacttttgtcttgtatttcgtgttctaagtcacgagagatctaaatatataataactcaattagtaaacttaaggtttgactcaaacttaaatttacaaattttaatttaaacatacactgctatactgaatggttggagggagtttttttctttttttttgaaggctcttcttggacggagatttgcctttttttactactaattctaagttctgactttgaaaatattttgaatataattataatacaataacaataatgtaaagaatgtatatgtatgtatatattaaattatttaattataaattatcaagtataataaaattattaattttttggtcattattttaaaagtgggtgatttctaattagctgaaaggataaaaatctttacttgcttagaaattaaattccaatatttttaaagtagtaagcatgataaaaaaaagtagaagaaaattaaagtaggaagttattataaaactttattatataaataccattaatcgtttacgatattccttatgcctcactgattatgacgagaagaaaactgaaagtagagaaaaaaaagtaatatataataatgtgtatgtgttttaacaataaataaataaattacacaaactcatcagtcattgtaaaaagtatgatttacataacttaatttgaaaaaaatgaaatatattagagataatttacataatctaaattatttttattttaaaactatagaaaaaataaaattttgtagtacttaatgcaataaattatttgtatattgatccaaccagctaaatagcgaatcaaaatgagtattttcaattaattaattctttaaaggccaaaatgttgaaaaactatgaaagaagaaacttattatataagcttatattttggtggtaaaatgatgccacataatattagacatagatgtatgtacaataaactagttatttaattgtttaaaaggaagttcatgtgaaatttaattttcaaatcgttatcaaagaatactcatgtagttttttttatacctaagtatcaaagatatgtatcaatatatatatgaattatataatataacttcctaagtaatttataattgcagtaaaaaaaaagtaatttattattttttgtaatgagattaacgtaattattcgtttgatgataaacaatgtttaactagttagtcataaatatatcgaaaaaaaaaaaaactagttagtcttattctcaaatattactaatttgctatgatagacttttgttacgattcatttatagtgaatactatcgcaaattttcattgaggctgtaaaattttatgacgataaaacgaatagtgggcgtaaaacacaggccatgtcgggatgaaggtaagatatgatattattatgggatgtatttttggcaaagttaagttagctggctttgtctcattacagtgttgcacatcgatcaacccaatataataatcacggcacatctgataattcgttaaaggctttcttcttagaactcgtaaacaagtcttaaaaagaagggaatgtgggataacaaatgataaagaaaaatgaaacacattgtaatgttaagaaattaaatttgcacatttacaatttgtgtctcgtaatttgagctaacttggaaaaacataacgtgctttttattaccatatatttcttccatttctttatatccgtgatttatggtgatatagtacattattaaaaaaaatgtaaaatctttgttagtaatatatttttttattgcagctagaacctaacaagtccaatccacggagcgtggagaaatttggagggatttttttacatacagtgtattttgagaaaataaaaaatattattatgtataacttatttaaattgtgaattatcaatccataaaactcatgtggatagtcaattcgcatcaatcatataaattttaatccgtatcaaataaatgactttcatattattagctcaatgttctaaccaactaaactaataaatcaattatattaaaaaataattaatatcactatgtataatactaaaatttctaatatatatttaatacacataagtttacataatgattcatacatattgataattcgtaagattcatatagattgatgatcattgacaattcatatacatcatacccattgataatttttaacaatccataaattcaatactggttgataatctatataaattatacataagagtatttttagttttctcatgcttgcaggaagaaaatttccagcttgaacaatatttgctgggccgaaagagcccaataacagtgtcaactcaaaacacaatttttacttaaaacgacgcggtatgctggcgctcaaaaaccgaacaaacagcccgcttcctcactatgttattattacaggcacaaccagtaccgtactgtaatgatgtgatagaaaccaaaaagctgttttcttttccatttttttaattttttttaaaaattcttattaattatattaatattaatattaataataattattccgttgcattcttccgttttgatttcgaaggagagggagtggaaatctgagagggtttcgcggcaacggcaatggcggagcagggaaaccgttggagctgggacgtcgccggcttcgagccgtggaagtcgccttcgccggagcaaaacgatcagaaacctactgtgccgttggcgaggagaaactccacctcctccttggttcctccgcattccttggcttccaaagttgagggattaagagaaaaggttaaggtaatgcgttttcatttccacgtgtatcgcgttcttcttctttcgaattcgctagctgaaactgaaattttggttttgagctatttcggtgagagtgcttatagtggtttctgcttccgcttcggttttatatgcttcgttttggattatttttttttggcgaatttcagtgactgttagtggcgaggatttgactgtgaattagattttggaatctgaagagaatttaacttgcagttgaggaaattgtctgctaaggtggaggcgttgaacaattttttgttccttcatgtttcagaaaataaaaataaaacaaaaaaaatatgctgtgttcacgaaagaaagaagaattacctgcataatgatttttcattttccaaaatttgtctctgtgtaagagagccaggtgtacttttttttattgttgccttaacggtttcctcatccagctgaaagctgttagtgttgtgttgggcaacaataaagagtatacagaggggaatgtgagttaagaagggattcactgtccttgtagaaactggtgaatcagagtgtttagaacatagtcctagatggtagtttctcacagcggttgcttgaatactataacaatcaggtttaatcagcattaactaagattccagatttgaaaatgccaattgcttaattaagattcccgatttgaagactccaggtacagtcagcattagttaagatagagtatacagagaggaatgtgaggaaagaaggggttcactgtccttattgaaatggcgtacagagtgttgagaacatagtcatagctggtaaattctcacagcagttggttgtgaatatataaattaggttcatttagcattaattaaaattccagatttgaaaatgccaattgttttcattttgtgctaggtttattgcatggttttgaactaaggtgcaagcttggcttctatgtgccttatgtcttcaaaatctgcattggatttctaacagtcaggaggttaaaatatcttctcaatcagcggcggacccagacatttgaaaatactaactatttaagtttttattgaaaaaaattacttgtggttttgaactaaggtgcatgcttggcttctatgtgccttatgccttcgaaatctgcattggatttcttagagtcaggaggttaaaatatcttctcaatcagtggcgacatttgaaaatactaagtatttaagtttttattggaaacaattacttgtctaatataaatgtaagtgatagacaatgtaaaaaaatatgttcataaaattagtttcaagctagtcggtgcatttttaagcaaggcaaaagcaaactttagagtattttcaaatagtaaaaagagatgttgtttatccaaaagtatatatacataactttttcctacttatatctagtagtgcccaaatttaccctgcttctagtataaattatttttgaacacttcatatccttgcatgttttgttgggatttttttggaaaaataattggtatttttttattagctcttttaggaaattgttaaaaaaatgtttattttctaaacatgcgtgcatatatatatatatatatatatatatatatatatatatatatatatatatatatatcagtaacatttttcctaagaacaatgctgtgaacactctttatttgaattaggcacaatttgtttatttgttactatgaacataagacaaaaccaaattgttagattgatgtttttttgttcccttaacaattgtagaaaaatgagtaattatttctctcattagctagcaatagcatgccatcagagtctatggattacttttctaacttttagccatacaatttgctaactaataagtggtaatcagagcaatttagaatacatagtcggagcagtcatgttgatctgtttgattgattgaagttttggcatttctcctttctgaaaacaccagtgtgggcataaattctctatgattcttgagtgaactttacttaactgggatatttcaacttgtcataattttggtgcattagtacttggtggttctgttatgaagaaggaaaaaatgagtgtggtctttcagtttcaaaattatgaatttagatggtaggcatgttgggagaggctgttagactaatatcaagaactctggaaggtaacatataggatcaaactcagctaattttggggatttgaagattttatgtgcaaacagagaaaaaggattattgttatgtaaaacagagtataagttatcctcttctgaaaaagtttcattaaaaaggtctagttttggattacataattttgtgtatagaatttaagagaaatttatttatgcacatatatggtgtcaaacaaatataagtaaagatgattcttacacaatccatgattatagtatattaaacatggttggagagggtaaattcttattattttttaaaatacttttagtagtattggattgatggggagttggagccacttgtggtagcctggtaggtattagattcagaactccatgctgccatgtaccaatgaaaaggatgattagaagatgtgtttttctggagtatcttttatactatttaaagctattttacattcttacaagttcaagctagtcaagttggttggaatttatgttttttatgtggcgtggtgtcctagctgatttttgtggatcatgcaaatttttttttagacctgtgttaacaattacatcaggtaatttgcacagcttgctagaaacgactacctgcagttaagacaagaagcaagtgaacttcaagaatattcaaatgcaaaacttgaccgagttacacgatatcttggtgttcttgcagagaaaacccacaagttaggtagcactaatttgtcttgacttgtggttctttagatatgcaactagttttggtatttgtcttttttactgtttattattttggtttattgggtcacttgagactatgtttggataaaaacttaaataagcgattatttaagcagagttcatttaaataagctctactatatataatgtataagaactggaaccaaaactgttagctagatagtattatttgttatagctttgctgctgatgagatcagcatgacaatgtgatattaatagtgttaatagtttggcaagtataccaaatgtccaagtaataaaaactcggaaatccgagtgtcaatttctacagagactttgttttgtacttgcgttagataattttcaatttataagaggaaaaagataagataaaagatgagttaaaagaaacactaactaaaataatagatattaaatagaagacaaaagataataataggaaattcaatgagatgagaatgctaggacctagcatgccttgtttgcctaagatgtattcattgagatttttctttgtcaattaggtgaatttttcttacttacatctattagaatacttgcccttgatgtcttacaatgacaaacctattttacctatctatctcccaaatgtctttgcaaagattcactagatgcatgaagttctaattttagatgtttgctttgatgcataggcataatgcaatcactctatgtctaacaatgattttattaagataccccttccttttaattctattagaaattaccctctgtcgagcgattaatttctaaaactgatgcatgcaagaccttccttgtatttctattaagcattatcctctgtcgaatacctaatccccaaagatgatgtaaggatgaatgatgcatgaaattaaaagtaacaaatgataataggaaaaaaaatacgtgtttgcattgataaatgtgaagtgtacaatacatcttttgattttttaggtctgtcagactataactaagggtttagtctctaataggcataagggaccttacacttgaaaatgagtttaggaactgatggaagagaagggatgaaaaaagggaatagaaaatgatgagagaagaaagaatttcctaagggagagttctcaggctttaggtgtgtattaaagtgctatgagactcggtgtgtcttttctccttggcttgacttccttcttatagttgctagagtgaacttgagcctgatgccaaaaatcttccttattcatatttttgatattttctacatctttttgacttttaacccctccttttcatatctgcaagccataaataagaaaaatatcaattcctaacatttaagccaaaaataactgctaaataaatatttttaaagatattttcattatatttttattataaaaaacaactcatatttagcagttatcaaataacataagcctatgtacacaaatctgtatatgaaattttgaattcctcagaataacaagacaatttggaaaatgcaggtaacataggcattcgggaggcccagactattccctcctttccactctcatcttcttgccttctttctctctctgcttcccttttttctcccttaactaattgaattttctgagatgttttagaggagcagaaaattaaatgaaaaaaaaacttctttctgaaatgttcaaatcataccaaacatggcttgtattagttttatctgagatgtgtttagtttcatgtaggcatgagacatttataaatctgatgttctgagcaacaatgataaatgtattgaatgtatatccagatgcattaatttcttgaagtacttgcagttatgtgaaatttgaatatacctacaccaacatatcttttcttgttaagccattatgctgatggttttctatttttaaattttgaattttgtgctgcatctgtgaatgccagatcaagttgcccttgaaactgaggcaagaatgtcttctgtgatcaatgagaagaagaaattgttcaatgacttattgacatctaaaggtgattgctatatgtagttcctttactattagcttcttttattgacatttttttcatccctcaatggtactgtttgtataatatgtaatataacataatatacgttaactggaacttaagcttgttaactacatggcctgtctatccttaagcatattcaaatgcatgttttgctgagctggaaagatctatctagctgttagatatggttctattatttgcaggaaacataaaggtattctgccgtactaggccattatttgaagatgaaggtccctcaattgttgaattcccagatgattataccatccgtgtaaataccggagatgaatccttgtctaactccaagaaagaatttgaatttgacagagtttatggacctcatgttggacagggtaaaatggctccattttatgttactatttttggggggagcgactggggagggggttccaacttcaaaccctgctaatggtctgatttgctctttaatatcttacctcttattttacgtttgcagctgacttgttcagtgatgttcagccaatggtgcaatcagctttggatggatataatatttccttatttgcatacggacaaacacattctggaaagacacacactatggttgttctttctgtctttcactgtgtgtgtgctgattgttatcccactctttcaaaataaatagatatttgaatgaggctctagaatttagtgttgatttgaaattgaaatgcctatcctgtggatgtgaactttattatttatacattttctttaacttcttgagtctgtaatgcctgataatcagctttggatggatataatatttccttatttgcatatgaacaaacacattctggaaagacacgcactatggttgttctttctgtctttcactgtgtgcatatttccttatttatacattttctttaacttcttgagtctgtaatgcctgataatttgcatctgcaatgttcattcattgttctcaggaaggatcaagctatgataggggtttatatgctcgttgttttgaggagctgtttgatttgtccaactcggacacaactgctacttctcaatgtacattctgcattactgtttttgagctgtataatgaacaggtctccttttcttttcacttactttgtgaccctttctggtgggtctataatttgcttcctggtttgggttgacttaagataataaaggttttcattgtctctttttatgtgcttacagataagggatctgcttttggagtcagggaaaagcttgcctaaactgtgttttggatcacctgaatacttcatagaactaatgcaggaaaaagttgataaccctctggacttttctagggttttgaaagctgcatttcagagtcgaggaaataatccattaaagattaatgtttctcatttgtatgatctctgcctatattatgcatggttatattgggaattggctttatgtttgatgtttgatgttgcatcatagatttctattgatagcatacattctgcaatggagctggtgatgtcaatgctcagatcagagtttgcattataggatacaatataatataatatgctaaagatttttttttcaactattatttttgcttttacatatagtattttttatattaaaaagtaacaaaaggaagcagaaaatattgaggactgaaaaatgaaagaaaaaaaagggcttattaagcagcaatacccattagtttgattatgtctttatgttttttcaaatttatcaccgccatgataatgttgtgtcagaaagattatcatggttgttactgttttgatatttgtgctcatctattttgtgtgagtagatgttttctgcacaatgcatatcatacactaattcagataagtgaattttgtttcatgccttgtattgtcagggttgttacaatacacatattttataacaatttggtcaccggtgaaaactcatatagcaagctctctttggttgatttggctggaagtgaatgtttgataacagaagatgatagtggtgagcgtgtcacagatatgcttcatgttatgaagacactttcagcgtatgtttattttattattattttttaattccttacatttttcttcactgtcaactttatgttttattagattatagtcatcaggtattctttgtccacccatgtgagttaatatcaaatgtcaatgctctttcagtattctctctgttctcgatttttggtggtttgtcagttttcattcccaggtgtaaatggtactaattttggcaactgatttcttgttatctctgatttgctccgggaacacagatgtagatagttgggcctcctatggctagttgggactggctgttaggcaacacttgtaaataatgcatttaatttatattgttgtcacctgattttttgttatctccttataaataacaaattgactttgcttgatttataattcatcatgttcaaaaatcacaatctagatccataaaattgctgatctcaaatctgaggctagggtcttcgatttatccggctctctaggagggttagagtgcaatgaacataaaagaaataaaatattacatgactatggtgtgatccctacattgttgttaaatggtggcaccatgacagattttttgccaaacgccataggccgcaatggtgtgtttatatggcggaattatggccttctgccatatttcgacatccatcattgagaacaatggatcccaaaaagcagatgactgagcctaaaaccccttagattgagaattatacagtgtcatacctgtactaggtatctagacctgtttggcatactattttgaatcacaaattagttagtactggtttaaatccacaaaattgtaatattatctgatctgatttctccttgctaaattcacgaactatgaacttccttttttctttcatattgaagtttttaaccaattgagtgtgaggaatgaggaccatttatttgttggaattttctgtgtcttacttcttgctgcatttgaaaatgtctttacaggttgggagatgttttatcttctttgacatcaaaaaaggatgctattccttatgaaaactcgatgctaacaaaactatttgcagattcacttggtattatttttattccatcttttttttattataagcttatggtcacatctgtttgtaaaaaatgacaagagaaaattgtaagtgtctcttaaaatgctagcatgtttttgcatgtttggtgtgacttttgcatgctattatattatctaattaatatttagatactctgcctagtttttgctgtagttcctcattttctaattggattgttgttacaattaatccaaacctgctcaacatcaagtggcatctgtcttgttttgattccatttcattgtctgttagttttctagtttattttggaagagtattgaagcatacatacattttcagttagcattttttgttatctgtttgtcagttatgaattaggtaaacttaaaactttagcccctacagtatccatccattttcaatttaatacataacattattatttttatttttcctcacttataaacatttttaaaatagtcccttccgccattttccattataacaacatcaatttggtccctactggacgtatcaaccttaaaaaaaagaagcatctaaatgtgtacctgctgaacgtaacagcacatactcagaagagttgagagtatctgcaggagctcctactagaatgacggagcatctgtggaggttgttttacagaataaaaaaagcacataaagaaacatctatttgataaagaaacactcagttaagaaactgtgttataatagtgtgggttattttgaaaacacttggaattttaaggctgaggactgatttgaaaagaaaaaactaaggggatgaaagtgaaaggaaactatagggaccaaaatttaatttaacctttgaatttttatttaacaaaggattacttcttatcgactcaatgtaattttttatatatatgactaggaattcaattatttctgcttggtctcattagatatatgataacatttttattgtaatttttctttgatgttttaggtgggagttcaaaaaccctgatgattgtaaatgtgtgtccaaattcttcaaatttatctgagacattactgtccctcaatttctctgccagagctcgaaattctgtattaagcctcggaaaccgagatacaattaagaagtggagagatgttgtaagttcttccataaccccattacccctttgcaaaagatagtcttctacttttgatttgcttttcattttcaaccgtattttatgggaagcagttaaaaatattactcatgcatattatgtatatggatataatgttgattttgcattgaaccactccttttactcaattcaaatttcaaacagtgttttcaagtttaatacaaagttacttggatatgtaagattgattcttttgcagtgtaactgagaaattgcttggattttgttatattttttcttatataatctctgtgttcataggaagtttaattttactcagttttctatctctttcttaaaaaaaatggtggtaattttgactcacttaaaagattacaaatttactatatatattccagatttaagttgtgatggtttttataggcaaatgatgcacgtaaggagttatatgagaaggaaaaagaaatccaatatctgaaacaagacggtctgagacttaagcaagcacttaaagatgcaaatgatcagtgtgctctactcttcaatgaagtacagaaggcatggaaagtttcttctgcactgcagacagatttaaaggtttggctgtttattgtgttgggcttaattttactgtcatatgtagtgacatgttactaagtggtttgacaattctgtttatctacatgacatgctttaatagtgttaattcataaggtagttctgtgatcttttcttgcagtgagcagaaggagaaagtttatacagcatttaagtaattttctttagtggttaaattcaatctaatgttctataatgtctgttctagcattttctgatatcaaattttagcttggatttgaggcaaatgttcagtcaaatgatccagttgtctgcatggatctgatagaaatcaaactgcagctaatcagcaatgtttttctcctctcatcagtgtgcaggaatatcaaatatgctatattttcttgctattgtccctgtgttcctacattgtgaagagtgaagtttttgtgtcaagtgatgttcctttaaattttagagatacatactatttgactgcttagtatctcaatttgatgctgttctttcacttttttcctattctgtctcttgtttgaaagagttgatgtcatatgtgcctttgtttggagagatgtaaacatgttgtacaagatgatgaagatatgtctgatgtccaccttttctgaacattcacactgtgctacaacacttgattgttagctttaaacagaaggcttgccagtgagcaacatcattgctttattttctgcagtcagagcatattttgctggccgataattataaggtagagaaagaacaaaatgctcagcttagaaatcaagttgctcatatgttacagttagaacaagagcaaaatttgctgatacaacagcgtgattcaaccatccaaagtttgcaggttaatattttgtagtttacatatagtgtttaatgggtaatttgtgactgttttatcttgttcattttctttaataattttgttggagataggaatattttatgagatgagagcttctttaatgtttattttttcaaatagccaagatacttggtatagctaggttccatgcatcttaggaattagtggtattttaattgttctcttgtaaattgttttagcattaattatttttgtaatacccttgaataaaaagaaagcccattctgcttggtggaaaaagcactcaagcacattcagaaaattttcctttctcattttctcacaaatttatattttgctgctgtttcctgatagcaatttaagttgttaaaaatataatgctttgtatgtaatgttctaaataatgacatagcaggatcatccttagtatgcaattcagcaaagccataactaatcatcttgccatattacatgtttccagttagtacatatagtggttgctacttgctaatggtaagtctgtcatattgctggtggtagcactacaactacaagtgtgccatccatctatcacatgccctagtctgaggcatggcactgcagaccatggcatgccaccttagctttgctttatagcaactgtgatcttagatgcatgtgaccaactttgtttgtgcttgcttgataatgtatgtaatgtctttttatcctctgatacaggctaaaattggaagccttgaaatacaactcaatgaagcccttaagtccagcaacactgggtcaaatgttggcccagaaactctgtctggaactctatctaatcccaggacaacgggggatggcacggattcgtctgcagtaaccaagaaactggaagaggaactcaagaaacgcgatgctctgattgaggtctaatacttgtcaattttctgtctgattttagtattcttccaattgttgtttcctattggattgtggttattgattttcacttctttatgcaatgttctggttaattttttcgtagtcatttatttaattgaggaaagatttagcaaaccaatggccctttggtcaagtgagagcgactccttattcttgggttgctcatgttgaaatccttgccaaccatcttaatatatgtggtgaaaaaggggaaattctataactatattgggaaaaatccaagtcccacattggctagagataagataaagatagaatatataagtgggggataatcctcatcccatgagctagcttttggggttgaattaggctcaaacccacattctaagatagtatcagagcctaccttagacccattaaatgggccacctaccatgtcatccacacaccaagcccaaaagtgttgggcgtgaggtggtaaacccaaaccccacatataggctagagataaggcaaagagagaatatataagtgggggacaaccctcacaccacgagctagcttttagggttgagttagacctaaacccacattctaagaaattgcaacaaagatatctcaatgtacaatttttttttttttatgattacgtgaattctggtttgcttgtcttgtgaaccttctagattgtaaaagattgaataagaaatccctgaatatggttcctgtgtatcaaaatgtgccatgccataagttctgaatatttattttgttgagttcttcaaatgtgttgaattattgcatgcttacattagtttcattttatcctggtgaggaactcatttcaatgttttgcagaggttgcatgtagaaaatgagaaattatttgataaattgactgagaaagcatctctggctggatcacctcaggtaggcaaattttattttttactggagttactgttcccaagttatcattcattatgtgtctgtaatggtgggggtccatttacatcaagaataagtttttaactcactccagttcttaactatttataaatattagagttttatcaatcaatcactgaactatgttcagaaggtagatcaggtttataaattttcatggagttttaaaattaattggtacttcattcaactactttacattaaatattatataccttttgaaatgtatgtaaatgtcaaatattagattaaatatctatgtattggtgggctccatatactctaatagttgagtcttgtacacttatgttgttgagtagctttatataggttactaatttcactaattcaactgttgaatattgtcatatcgtgataatgatcatgcataccaaatttaagataaattggacatccatatctgtgtctgtgtgattcctaaatcataattcttttgcattgttttgatggattgtgtacgcattaaaagaactgtgcaacaaagtagttggaaatataacttttattgcaaagaattttttacttaataaagtaaactagcttctgtctgtgtggctctaaccacaggaattcttaaatattgtttcatcatatatactttcttttcttcaatcaggctatcagcaatatatgataaaatatagaagggatagatggaagaatctaaagtactttgactattatttgtattgcatgcttctaggctgtcaaagtggtgtttctgctgttttaagattttcaatttattttcagctgtcaagtccattatctgggggagcagttaatgttcagcctcaaaataggggaaggtataattttactgtatgtcctatgttttgcagtttgtaagtgtaaatgagtaactaactctatttagttttttaactgtagtcagttgacagttagctttagttagtcttcagttacaactgaatctcagcagtataaatattgttcttgtaagagatctcagtagcctttgtaatattttctaaggtcaatatacaaatctcttttttcctctctagagtttctacatggtatctagagctctctgctgttatattttgtttttaagcatatggatattggctttattctcgttatattcaaacaggaatggcaccagcaccactgcgagagctcgttctctggatgttcttccttcttctttgatgacagataagaatgatggcactgttgctttagttaagtctgattccgagaaagttaagactacccctgctggtgaatatcttactgctgccctgaatgactttaatcctgatcaatatgaaggactcgctgccatttctgatggtgcgaacaagcttttgatgctggtatgggtcttgagtgttttgggttcagtttaataaacatagataaattgtagtttatgtgcaacattgttcttttgatttttatatcaagtctttcgggttgtttttccttgttcaaattacgaattccgcattggttgcctcagtgtgggccttagacaatgtttgctctttattcagtttgaaaatgtatagaagcttgattcgttatagttttctgatggttatcagtcaatttgtggcaacatattactaaagagagaggaaaagtgtatcttgtgggacattaaatatcatcctagaaaagaaaataaatgaaaactgcgagataaagttgctgaaaaatgctaaaaagctcttcaatttctttgcatatcggtagtacaaattcctttgaaccaaccatgtgcagatcatgaaagacaggccataaacacaactttatcccatatcaaatgtaagagtttagacaacaacaatctagtattttctcactaagtgaggtttgtacatggaatcaaacaatgccataaagtttttctgtaaatcatgtctatacacaaactattgacctctaaatcccttttaattgtttcacctacaaaaatgtaagagcatagacacccttaaaaaatatatgtttgatgttgattagtgataggaacttgctaaagagaaatctgaaattgtatttgtatttctgaaataaggcaccagtacaagagaaaataagaggcaaacccccttttaagtcagtgtttactctagactccaatgacagcaatatcatactcccccccccccccccccccaccacacacaatttttttcatcctatataacagactcggtaacatactctctccctgtaactctctaagtgggccctggatatttgagccagcagatataaaccttaagaggcttacccatagaggtctggaacttatcaattggtccgcatctttatgaagtgcctagaccaaatcaaatacagcatgaagccatttcaggaagttagatataaaaccattcattagccttctcctgattgctaagcttttgaaatagttggttcatgacatggtatcagaggtcaaacctcatggccaagtggtctagggtttgttcctttgtgcccctattcttgataaataacttgaatttcagcataaggtaaggtgtgcttgtgtgtatccatgcttcaatcccaggaggctcttgcatgacagacaatgttaaatacaagccaccctaatagcttctgtttgcaggatagattttacagtcattgttcataatggtcgcaggttctggctgctgtcatcaaagctggtgcctccagagaacatgaaatacttgctgaaattagagatgctgttttctcatttattcgtaaaatggaaccaaggcgagtaatggataccatgcttgtttcccgtgttagaatcttgcatataagatctttgcttgctagatccacagagttgcaatccattaaggtagagtatctttctttctttttcctgtgttagggtgcatatagtgttgttctattgaatatggcgggcataccctttctaatttagtaaatcttgcacattggattggaaggtattgtcagttgagtgctttcttgaaaaggccaacgctggacccagtagaagttctagccgagcaagcagtcctggaagatcttctatgcaatatgttgatgagcagatccagggatttaaagtgagtctaaagccagaaaagaaatccaaattttcatctgttgtgttgaagatacgtgggattgatgaggtaataatattatcctttaatattgttggaataaccgggaatttagaaggggggaggggttgaatagattctttcgaaaaccttaccgcttaatttcttaattcaattaaattaaaatcaatactcttttacaaatcaaggttttctcaaaagacttgttgaagaaagatcaacaacacaaaaaatcaatatattcaaaaaccttagaaaacagagttttatggccctttcacatcaattccgttaccaagattgattaacaaaacaaaggtttagagaaagagagaatcacactcagaatttatattggttcaatcctcaagaggacctaaatccaattgttctaagaccccttaaaacttccaaataaaaaaccaagtacaaacactatgtacatgtaatttcctaaaaattctactcttctcttgaaccctacaagagaaggatcaggagttgattgaaaccctattaactcacacaaacccttgataactctaatcaaggtcagaatctataaagaatttgaaattagattgaatacaccttgatgtgtaaatcacaacatcttcaaactcttcctttgattatcaaatcatgatgaagaatgaatgaatcttgatcaatacgaatctcttgttgaaatgtagattggttcccttagatggctctcagaaagtgtttttcagaagataagatcaaatcaagagtcactaatgagaaagaacaaatgagggtatttataattttaacaaataaatctgatttagtcgattatcaaatgtggtaatcgattaatttgttcaaatccctcttgttctttatttccaaaaaacgttttaatcaattatctcgttttacagagagctcttaaagtttccacacacaatctaatcgattactaaatgtggtaatcgattatctcgagccacaaagatttccttttgctgaaactggcttaggtaatcaattactgaagttgtaatcaattaattcgacgattcttgccaaatttcaagagaagtgagttttgttacttgttctaacactttgtaattgatttctactaagcatggataagagaactaagtctaaaatactcaacatgcctagtctaaaaacatccaatacaaatgtcaacttgtttgacattgtaaaattattaaatccaaaagatccttagactagtcttcaagtttttaatctctttgattcaacaaatagttctggttagatgtggtagaaaactattgagcaggattttgtttctcatgtctttcttttgaattttgaaaatcattaaaaatccggtatttcctagtgatcctttcttactatcatctttgtacctatttgcgggatggattatgtatgcgtgtgtttccttgtttttttaattttaaataaattttgtaggaaacctggagacagcaagtaactgggggaaagcttagggaaattagtgaggaagcaaaaaattttgcaattggaaacaaggctcttgctgcactatttgtacataccccagcaggagagctgcagcgccaaattagatcctggcttgcagagaagtttgattttctatctgttatgggaaatgatgcaccaggggggacaactggtcagttggagcttatttcaactgcaattatggatggttggatggctggacttggcagtgctctgcctccccaaactgatgcccttggccaacttttatttgaatattcaaaacgtgtctatacttctcaactgcagcacttaaaggtacacttcatcttaaatctgtctgtcttgaatgattattcaaaatgaatgctattcaatgttcttgattactggaagaaaccatgttcaacttgggactgtgttgagagagatggtgctcttactagttatgctcattgtgtttgatgcattcatgaatatgctagactttgcccacttacattggcaccaatattggataatgtgcttttcttaactttgttttcatatttagctaatgtttactccaaaggagtgtttttattggatgcacaaagagattgtcaattgggaagctttagttagatgaagtattttcttctaggcagttattttctttaactatctcatctcagacttaactttccatctaaacttggtgctagctaaaaaaactactgcacaaaattttgcaataatgctgttaaggtgtcctacattggctagaaatattgccaaagtactccttataagaccttttttttattttaacaaactccttataaggcttgagcaatcctcttaccttgagctagcctttggtgttgtgttggactcagttcattacttcatttccaatagcgatgatatcaaaccctatcctatattgatgttaggccacccacaatgcttagtcttatagaaacttaatgtctcaaatgtccattccttgctgtgattgggttgtgttaagatatcccacatcagctaggaatataaccaaaatactccttacattttcaaatcttctattcaaatcacctaattgctttgctacatttgtgagttgttcattaccatctatggctagttacaaatcacctaattgctttccttacattttcaaatcttctattcagctaggatttttgtagcacgggttaggtagcagggtgctgtggtgctggctttgttcctactaataatcataggaaccagctggcccctaaaatattgttacttcagtaccactggtactcattattaatatatcatatctatgtttgctgagcaaaaaaaaaatctatggctagttacatttgtctggtttacttgattgcatttagtggtttggatgcatatcataaaccaaaaaaaatgagggaaatgccatgtttaattgattttcacgtgttaaattatgtgttgatccttgttttcctaacattggcttatcaggatattgttggtaccttggcaacagaagaagctgaagatgcagcacaagttgcgaagttgcgttcagctctagaatctgttgatcacaaaagaagaaaggtactttttgtttgactttagatggatcaaaggatttctgagttgcctgtggtaaatccacaacatgattaattatatgaactgatatttggaaactaggaaagtagtgaaactaggaaattaggaaaatgatacgaagtcaaaacctaattatatatacagctcctaaacagaaaatgtttttttacctaaattggggatactttcccacatatcttaagcatgcatgtaatagtgtgaactataaacttgtatttgcatatgtctagagttctgtcatgagttgatggttttgtcattgcactagtttatacagagattgcatgggaaattttaagataacattataacatgttattgttatgcatcttttttatttttttgaaatattttcacatgatacttagaaattgctttgataagaggaagttaaagtaccatacaaatattgtaaaatctctttttataattttgttgattctactctgtttgcccagtcttattcagcacttctagagagccatctttgtctaattaggaagatgtaaatggaacatgtactccttctcatttgttgtatatactaatactatagacaacaccagttatgacctgctgaactcaaaaggaactaaagtcagctaagtagtcttgggcttcaatttattaaaattgattactatagttcatactgagcaacaaaataggcaactaaaggagggataattttccagtaacatacaatgttaaatgaatgttctggcaatttgtcagacttgtacctttgcaatgttagtggtagattaagttttgaatagcaattaaagaaggaagcagatggtttattttcatagtataagtgaatgtctatttatcatgtcctgagtcctgacattgactttctaattattttcagattttacaacaaatgagaagtgatgtagctttgctgacattggaaaatggtagttcgcctgttcaaaatccttctactgctgccgaggatgcacgattagcatctctcgtttcacttgatagaatattgaagcaagtcaaggtggtttcttttttcttattgaaatatgttttttgaaacttcagtgttctataggaaatactcaattaagatataatttgaacaggatataactcgactttctactgtgaacaccatccagaaaagtaagaaaggaacagtgctcggttctcttgataaactgacagaacaaatgccttcacttcttgaaattgatcatccatgtgctcagaggtacattgcagatgcccgcagaaaagttgaggtaagcaaattattgctctgtatggctagattgtatcctgagttatgaaggaatctgaatatgctttgaactttgttggcatactctgttaactacaattcacttcaattgctctggggaaaaaaacatatctttcatattaaacattaccatttatttactctgttgtattttttaaaaaaaacatctatgctgttcaaaatttatctgttcttttccctgtatttgactatttcctttactttttaaaattattgttaactaaattttttgctcagccaactgggattataacccgtgtaaatacttaataaatgttgtacccaaaaggaaaagaaaagaaagaaaactaagggaatgaacggatgaaaacaatttgaaatgctcctgtctcagcatttctggcatctgaatctgtgtctgagcctgaccttaattgagttttgggattcctaatccctcttttatgatgcagtcaattcctgaagaagatgaccgcattcaaaatctatcacattctcgcaagccatcaacggatacaggctctggatctggaactgatgtggcacagtggaacgtccttcaattcaatacgggtaatacctcaccatttataattaaatgtggagcaaactcaaattcagaactaatcattaaagccgaggctcgagttaaggaacctaaaggcggcgagattgtgagggttgccccaaggccgtccattttggaaaatatgagcttggaggaaatgaagcaagtatttgctgaactacctgaggctctaagcttgcttgccctggcaaggactgcagatggaactcgagcacggtattctagattatataggaccttggctatgaaggttccgtcacttaaagatatggtcagtgagcttgaaaaagggggtgcactaaaagatgtgagaacatgaccttttaaatcgaaagatgtttatgaaatttttacactatgccttgagtagcttgcatgtgcattatgtacgattgttattctgtgtgctcgttattgtatttagttgtaattatctcggtattttttttttgtattgcagttttgtttatcagtaatcaatccaaagaatttgagtccaaaggcttattttttacttgatgttcatttgataattgaagttagtttaaaactcgcctcctccggcttttataatcctcaacctcattatccttcgtgcgtggctcttgcaagccaccatctcagaaacacactatcaaacaaaaactcgtgtacacaacacatttctgcaaaccgtaacaagaccacaccatgccttacttaattgccatgccatgttacccgaacaactattatccgactgtataatatatttacaaattcacactaaaaggtcaaatgttagatatggatcaccatatgctattacttaatttttgttgaaaaatttgattgtccactattaatagtctcttaaagtgattatgtattttttattcacatgatttaaattcgataccctatttaaaaattctaagtctatgattattataattgaaatatttatttttcttacaatgatgagaggaatagtttttacataaaaatagtatgattatgttcatcaaatcattttagctaatttttaatattttttactagtttctaatattttaagatatagtataagattaatagtagaatttataatatgaaaaaaatgtaataattgaaactaaaaatgtaataaaaataatttatctatgaaaattataagaatttagaattaattaaaaaattataattataacatctcaatatattttataaataagttcatatataaatatcttataaataagtttatttttatcattttacattttttaactacttttaactacccgttaaatttttagtttccaactagttttgcgaaacataattagtacttacaaaaacaattaattcaaaactcaaaatacattaaaataataataaaattatgttaaattcaagctaaatttatcatgaactttcattaactgtgtctgtgtactttaccttgcaaacatgcaaggtgattaatgtaaacattactattcgagttctatatataagaaatacatgaggacattttttgcaccaaaatataaaagaatatataattactttcaaatgcatttttttttggtttttctaacttgtgcaatattaataagagtaattaattactaaattttacctaatttagattaatagttatttctaattattctttcaaattaattattattattattgtttggattaatagattcactttcaatcaaaataataaatatctttctctcatttattaaatagattcattttctataatattttttttctaaaagaatattttctctctttagaaataggaaacaaaataatatagaagttgggcaacaacaattacatcatatcataatggattcatataggggctcttcactttgaactctattccctttaaaagaacaagcttataatgtttttaaaaattttactttctaaaagtttcaagaggagtttcacatagcagctcagcacaatataagtgaattagttatacataattataaataattaaacataatttaaaatttcagttctgttatacatgattatcataaatacacattgaatttaattaatgaattaaatgattattaaagcacgaattaaaagtaataaataatttatttataacagtcatgcattaaatatattttttaaatattttgttgttcatagtcaaaattacggttaggtcctttaattttcttggaaaactttatataataaaagattagtttaatgtcatttttttttcatgattattttgtttgatacataaagataatgatgatatttagtcgtcattatgttagattaattaattcaaaatttaaaagttgaccgaacattaacattttaaacagaaaaatgaaaaaatttgattaaaataaaatttttaaaaatataaaagattaaaataaaacttttaaaatttaatgtatcaaaacaaaataaccttaaaataaaatgaaccaaaagtgttattaaacctaaaagatataataaaagatttaaattttgtgactgcttttttatacataattattataaatacactttaaattttaatttacaaattaaatgatgattaaatcacaaattaaaagtaataaatgatttatttataatagtcaaatattaaatatattttctaaatattttgttgttcacactcaaaaattacaattgtgtcctttgcctttttggaaaaaaaacttaaatttatgtttattactttatactcttttatccctaactataagatatactaatttatgtttattaaaaaagttaattaacttatttatagcattaaatttataatattttttcaaattcatccttaactttaatagaaaggtatttattttcttccctcttcataagagaaaaaaaaaagatgattcatggtataataaaatataataaaaaatttaaaattttgtgactgttttttcatacataattatcgtaaatatgcattaaatttaattgatgaattaaataataattaaagcataaattaaaaataataaaagatttatttcaaaaattatatatattttctagatattttaatattcatagttacaattaattatcattgtctgatttaactttttgcgaggaaaacttcaacttttaagtatagtgcacccactcttttttccgtctttctcctctcttacttgtttgtgctctagcgcgcgttctggattctaaaagacggtgaatgaaatgtcttcaatttcatgcacgaagctgacactgttcagcttagcagcggttgcgattcagttcatcggtctctccatcttcgttttcggcttcttccccgtcaaaccacttctctccggttacaggtaacaaacactataacaattttccatctccttaaccaacctttctccattcattcattacttcacttttttttttatttatttattttctgttagtggctgcgagagtttccgacgaccaacctgcgataacgatggcgctgcaaatcagagctacgcgtctctctctccagatcgccgcaggtttttatatcaggttgtggttgtgaatgcatattctctaagtttgaatttgacatttaaattctctatatacttgttacgaataataaaataataatcgtttgtttgatgtcagatcgcagtatacgatatataatatataatttgttgtgaattggagatctgttacgattgctgttttagagtgattgttttgatgcaatgcgattctcatttctgcttttagttttgttttttactgataggtttgtaaaatgttgttttgtttgtataggaaggatccgagattcctcctttgtatgatcgacttgtcttaatggtatgtactattggtggaaatgtcatatttgttgaggtctatgatttggttatatatgtgttttgttcgtttatggattgagttatatggttttgcattaggttattgatggtcttccagcggaatttgtgcttggcaagaagggtcagcctcctagcaaggcttttatggaagctatgccatatacacagtcattattggcaagtggtatggctgttggatatcatgcaattgctgctgctccaaccgttacaatgcctcgattgaaggttagtgttctttcctgtttctagtgtggaagtacgaaaggaggtcgtatgatagtatgatctatggtttttctttcctttttccaacctctacttattatatatgtttttgtttgtcattccaggctatggtttctggagcaattgggggtttcctggatgtggctttcaactttaacaccctggcttatttagatgacaatcttgttggttagttgtagaaaccaatgttggaaaaatagaccatatcattttttttcctgtgaagtgtgaactaatgttgatgtcatcttacttgcttgttgcagcacagttctttaaaattgggtggaaaatggttatgcatggtgatgatacatggctcaggttatttcctggtttatttgcaagacatgatggagttagcagtttttttgtaagtgcttttctataatataaaataaaaagattcttttcgacttctcaatccatgaacatttctcattaataatttcttatgtctcagatgaggacaaggcaatatgtctcaatggttttaagtttatatataaaatagtcatagaattcctaacctaagagaatagagagagagaggaaagtgaggaatataatgttattcattaacccgagttactgaagattacagaaaagtatttatagacagttctgttagagagagtagcagcatccatctaactaacagctgttagataactaactttactaatagctaggtgagtctgcagttgaatagctgcagctcattacaatactctaataaatagtatggttgctttattattttacatttgttaaatatctaatcatatcttatgttaataaggaaacctgtatagctaatatttaggatcctgtgggttatgtatccttaattgtagcatccgtctgattataaataaacagcatgtgtgtggtaccaatggacacagtttctgtatattcttatgacattgtttttctgaatcttcttgttactacaggttaaagacaccgtacaagtagatcaaaatgtgtctcgacatcttggtgatgaacttagcagagatgattggaattttctggtaggtaattatgacaacttcgtaatttggtcggtccctaactaatattttttgaatttccgtcttttgataattttcaatttgcaaacttgtacatattctctctgcacctaatgcctttttctcagtagtatagaacatgtaggttttaacccccctccccctcgcatttgcacgttctttttctggccaaagagttagctgttattttattgatatcatattactgatgaacgagggtgagccctggtgcagcggtaaagttgtgccttggtgacttgttggtcatgggttcgaatccggaaacagcctctttgcatatgcaagggtaaggctgcgtacaacatccctcccccataccttcgcatagcgaagagcctccgggcaatggggtacgaagtttttttatattactgatgaacattggtttcatgtatgctttggtgtatttctgagtacaggatttggatataagcatcattttctagtgtgcatgttgtctagctttccaagtgtgctttggcatgtttttgagttttttcatgcattccaaaacttgtttatatcccctgcttttttcttggaaaaaataacttttgccatacaaataaatttcttgaagagattgcagtatgaatttatagaaatgtggtgttggtaagtttttgaagattaaacaagaagactgtcagactgttgtccttgtcattctgtttggaactttgactgtttgactacattgagacatttccccttcatttccttaaattctaacaatatatcactaggactgtttaatggatgcacttcagagatcatgtgatctttgataaccctatcaggttaaccattttcttactataataataagtgtcaactgccaagtgtttaaattgtaattttgttagatggacttatgtgaaagcttactactattattattaccttttattaactttgataagttggtttggttgattggttatatttatacctaataagcatttatgcttttatcagctataatataagagttggcttggctctgcttatatgattactccaaataggaaactgaaaaaaatatttgttttggttctacttgttaatatttactccatacacaacatcagtttactggttgctagatgttacatactttgttttcatctctcttatcaacaaacttctttcaactcttgacttttaaaggtagatatcaatctacttctacactaaattgttggctttcagttttcagcgaaagtcaagacttaagattcattttatagtataaggattctcaattttatgttaactactttcaccatgtactaaaggtgtatatttgtcaagttataaattatatgatggtttataatgaagatttaatttcatttatgtgcattttactaaatttattgtagatactccattatctaggcttggatcatgttggacatattggtgggcggaactggtatcatcattatctcttcactctatacatgtaatttcattctgttctctaagcttaacttggacatctactgttccagtgtgttaatggctccaaaactttttgaaatggatgaagtggtgaagatgattcatataaatactttgcgaaatctagaaaatgatcaaaggaagacacttctggtttgtaactacccttttgttgctttcttgaattgtgtactacagaattcatgacttgtttattgtggtgtgggcatttctagactttaatatgaacatgattatattatatgggcagagtatgaagaaagttatttcatcaatgtattatttcgtgagagcagagatacattatatagaagaaaatgaaaaaggaaagaataaataggatattcccagaattaactaggaatcccaaaattacaggaatgaaataaatatataatagtttattgtaatccttccaattaatgatatgatatgctgcgattctcctaaatttagggattgatttctgacaccccttacccaccccaagctggggaataaattttagctattcccagcttgccaacattagtcaggtttcaacgaagcctgtgtgcacatctccttcctctaatgttggaatgtagaagtgtagggtacatgtcccattttcaaattctaatttgatgaagttgtcaatccttacatgcttcatcctatcatgttgaattggattgtcaactatgccgatggctgacttgctatcactgaagaatttggtaggttcttgaattggaataggtaaaccttcaacagggtgtttgtgtcaaggtatgaaattttattcccgggaatcacattcccaggaatattatgtctgggaatattattctcataaatatgtttgtttgactatagtaatttcagaagaaaaaaaattaaaaaaaattcaattaaaatataaaagtaaaaaaaggaaatgtgggataatgaagtgggaatatgtagttgtagaaaataacttccattcccacgggaatccaatatacccaccgttctccatgggaatatgaagcacgtcaattgtgagtactttacattcctgggaatgtttttatcaaacttgtacccaacatgggaatgtgatattcccaagtccacattcccgggaatcttgctcgataccttgaaacaaagcctcccaagtaatatattgattcagatcaattcacaacaccttgagctattgctctatattctacctctgccttgcaacaagtggttctttttttctggcagatcactcaagagttcctctattgtatttatctatttagtttctgtatatggttgttgtataattttaatttaggatgcatttgcatgtttgagccagcacaatgttaagagagagagagagagagaaaacaagagacatgtgataaattccacgtgtttcaattagacagcagatcatatatttatattaggtataataaatacaaatataattacacataattacaagaatgtactataacctaattaacatataattctgccctatttacattatttccaatgcacacatgcttatatataagtaaagaaaaacatatgctggagttttacttgaaagcttgattttatgtggatgataaatgacccttgcctattattagttaattattaattaaaactgtaaagatcaagtcctttcagaagttgaagttttaattaatctctgctgcaaatggttttacaggttgtagtcagtgaccatggaatgactgagaatggtaatcatgggggttcatcctacgaggaaacagactctatagctctatttattgggccaaaaacccatgcctctggccattcatcatccaatcatgacacaatttttcaggtaatgagactatacttcatgcttgtaggctgtagcatgcaggactaaccatttctcataattttcttaacttctttcaatgtattatctcagtttgcaagccatgaaggagtattgcattcagttcattagcctacttttgtttgcaatatgcatgcatccatatgtgatgaacctcttatgtttttatatgaatttgtcacctgccctgttgaaacttattttgctatctcactaacccctgtttcttcttgtttgtcaatcttgaacctaagatacaattcaaccattagtcaatgactatctaccatttaactaaagatcatgggtagtaggtggtcgaatatgtatgcaatttacatcttattactgtgcaccaggttgatattgcaccaacaatagctttactttttggtgtgccaattccaaaaaataatattggtgttttgatctctcaaatggttgactctctgacaggttagatctctttttgtctatgcttgtctattgatcaaaagaatgaagcaggtgatataacattttttgctatctgctttcatcaagcatattatattatgtaacagtaaaagtatgttcttttatcctttttgcttctttgctgagatagatgaccaaaagttgagggcactgcagttgaactcatggcagttgttcagattacttcaagcacaattgcctggtttgtcctgtagaaattttccatgtgatgccttcgttactaatagtggacccacaatcagtgaatgcaaaggtagcaaggagaagttgttttgttgtttgtatttaaatgctgctactcttcatgatgcctggaaggctaaagtagtcaccaggtatgtgatagttttgttgtgccatgattttaatttttaatgaattccataggaaatatttgttaacatttttacttggcatttattttttaggtctaatagcacggaaggttataacagcattgttgcagcatataatgagtttctgagctctgcaagtgagtggctatcacacaaagcaactgacgtatgtgtgatcttctgagtcaaaatttcttgaccttgataaacctggaatgttgtcgatagccagtatctcatgttaactgatttgtgtcgttaaagtttcttttaaaatttctctctttctgttctttttcgtcacaatttatgtctgtgcagaaaccaattaatttacttgttcttggagttgctgctttggttgtatcatgcttgatacttttgggagttgtgtttgtcatccacaaagaagttcctgcttgggagacacaagaccatgacaattatgtgaagccatggaaaattgatgaggtgttcattttgtttggcatcctgatccttgtcatcagtatgggatcaagttccatgattgaggaagagcattatatttggcatttcctaacatccaccattaacttgttattttttcgtaaagcaatacagtctttggaatttaataaagcacatgattttctcaattcaatcaaggaacaaaagaatacatcagtatcccaaataagttccttgttccttattcttttttctggaagaattttgagaggctggcatcaaggtggtgtaaattggactaaccttcctgacatttcgaagtggcttgagcaggctggcaaccaatatataaacttgattcagatagcatcatgtgccatggtcatcataatgggaatatctgtattgttcttaatgcagtctaaaacaaaagtgttaacagggattgggctcagtttgttaatgtctggtttgtttgtattacaacattttatgaaacatccggacatgtctgcctcatacaataaggatgccaacttatcagtacaaatactctttgccgttctgggaatcaccactattgcagttgtattggttttgccatggattatgcctatgcaaactcccgacatatgctcaaggaaaaacttctacatgtctgcttctgttcctgttgaaattcagaactcgacaccaattttggtattgaaagattccttgtacatagttggatgcttgtacattacttcctggtgtcttctgcagttgttgcttcaacaatccatcaatgcggtgcctgtgttgttactctttattcaattcttggccagcatgcttactttttcttccaatgggtcatgtcataagcagtgggttgaggttagttgccagatgtcatgaataaatgttggattttattttatattttgatagcacattggttttgggtccaagagtgtggtgctaactctaaaagtgattgccctggaatctaaccaagggtaatttaagtttacttttggacttttgctatatattaattattaattttagggcttaatagacatgaacagtcaatgtaaaagtttttaaattgtaaactaataaaaaatcatcgttagtgtgatttttaaaatagttattataaaagtcaataaatttattatacatgacgaattgtgattaaatgacagtgtaaaaacatttgcattgttagtgcatactagaataattgtgattttgaagcttttttttagaagtgatgttattatcttttattttactttctactaaaattaattgattactaaagtaattacactatgatgatgccatgttacctgtgcttgctcctacacatcttgcatttccttttaatgcataatctggttctgatactgtgcatcttatagattactgctctgtacaatctgggaatggcaggccattttgctcttgggaacagtaatacactagctacaattgatgtggctggagcttttattgtaatgtctcctatttctcttttgtaattattttaaaaatagcacattaatttctactctgcatttaagattttaattgtccataaatatatatttcctcagcaaggtattaccttccattggcagggaatttcaagtcactcaaccttcctttcaggtcttctaatgttcattattacttatgcaaccccaatgttattctttcttagtatggtgctgtatgtctctgtcaaggccacaatctatccactagttatcaagaaaggaaattctggagaaattctcaagacccttcttggatttccttgcttagtaccgctgaccataaattctgttctcatgactgtgtacacgatcatcttgctgttgatgaggaatcatttatttatttggagtgttttttctcccaagtaagtcttccttgaattttatgtttagaggttgatgaatgattgaatcacagaactatcctttgattttggaatttgatgttgaacttataagggattttttatgattttctgacattatatttatagatatcacataaccttgcaaaataaaaacatcaatttcttctgtaggtacctttatgtttgtgctgcaactgcatgtgtctatgtcgggatctgcattgtagttgttactgtgatccatacatacattgtgcttttttggctgagaaagagtttctccataagtggcaaggcaaaaggtacgtggtggtcatcgaagttaagaacaaattagtagtgaagtgtcaaaaaacaattttgactcttaactggcttgattaataagtaaatattgcttttcctttttctttttgaggagggtggtggaatatagaaatctgatttctcactacacctacctgcatctttctaatgaataatttactgtagaactgtaaattcattggtgaagtattgaagtagtatataattgattgacataatctcacttttacacgcacacactatctgaggtatgcatatcttcattgcaaaataaaaatctggatacacaataaccagtagtggaccttttgtctatggggcatccagtccaatcaacatcattatacccacagatttgggtatttccgttgtcctcatataacaatccttgtcttggagcctttttaatgtacctgagaatgtgaatcacaactttctagtgatcaacatgaggagtctgcatgaattgactaaccacactaattgtaaaggagatgtttggtcttgtaattgtgagataaataagtttttgaaccagtcttttgtatctttctggatttgagtatggttcatcttggtctgccattaacttttgatttgggtccataggactatcaatgggtctacatgcatgtttcttccaaaatatcaagagcatacttcctttaggactttgcatgagcattgtaagcctcaataaacactaatttataaatggtaattaaatattatttcttatacaaacttaatagttatagtttgagtatgaaattcttctttatactcttcgaattttgtcaaatatcttgacagatagagatttgacgttgtcaaactagagcaattgtgtcttacagaatatagtttaaggccaagaaggaaaaatgtagcctatgcatattcaaatgatactgaaagtgattcaaacagtcatgaccaagattattcaagatttaggcctagaaaaccaactaaaagaaggaatgcaatctgtagaatgaagtacaaggagccaccattctaagaagacaatagaggagaacaaaataaggaagctagtagtgttggacaaaattcaaacatggaaagagattcatttttagccaaagaaataagttcaggcaaaaaaatcatttttaatgcatttaatactcttgaataacaatcatcaaaacttccccaaatttacagttttgtttgtcctcaagaaaaagaaactaacagtggtcaatcaattcagtgtttgtctgataagtatcaatcatagtgatagtgatgactatacatgcatcaaccaacaaatccttcgaattaaggtgcattacatttagagatatgagcatgtgtattgggcattagatgtgaaataaattagcaagcatgacaagtataagtaaagttctctaagcttttatcctcacggctactgtttctctcatgcacacaagtgtttcaggtgatttcttcatataagcaaccaacacaattctcaactttttcatttcatctcattcaatacacacaatgtgaatctgaaggactttgttcggcttgtaatgaggctgggctagaaataaattcatggtttttcttggttgcaagccgaacaaagtccttcagatccacattgtgtgtaaggaatgagatgaaattcaaaagttgggaattgtgttagttgtttatatgaagaaaacacttctatgcatgagagaaacagtagtcgtgaggataagagcttagtcaactttacttaatatttgtaatttatttcacttttgatgcccaataaacgctcatatctctaagtgtaatgcacattaattcggaggatttgttggttgatgcatgtacagtcatctttgtcactatgattgatacttattagacaaacactgaattgattgaccactgttagtttcttttgcttgagtacaagcaaaactataaatttaggggagtttgataattgttattcaagagtattaaatgcattaaaaatgattttttttgcctgaacttattcctttggctaaaaatgaatctctttccatgtctgaactttgtccaacactactagctcctctagttccactttgaaacatgctggtgttcaaacagtcatgaccaagattattcaagatttaggcctagaaaaccaactaaaagaaggaatgcaatttgtagaatggagtacaaggagccaccattctaagaagacaatagatggcaatagaggagaacaaaataaggaagctagtagtgttggacaaaattcagacatggaaagagattcatttttagacaaagaaataagttcaggaaaaaaaatcatttttaatgcatttaatactcttgaataattatcaaacttctccaaatttacagttttgtttgtcctcaaaagaaactaacagtggtcaatcaattcagtgtttgtctgataagtatcaatcatagtgatagtgatgactgtacatgcatcaaccaacaaatcctccgaattaaggtgtattacatttagagatatgagcatgtgtattggactttagatgtgaaataaattagcaagcatgacaagtattaagtaaagttgactaagcttttatcctcacagctactgtttctctcatacacacaagtgtttcaggtgatttcttcatataaacaaccaacacaattctcaactttttcatttcatctcattccatacacacaatgtgaatctgaaggactttgttcggcttgtagtgaggctggactagaaataaattcatggtttttcttggttgcaacactttaggttttagaagagcattctctatttgaatgcaaacttttcttatcctgccctcaacttcttactgcacttatccccatattagcatcattcaataatcccataggcaccattgcttcagaattatttgccatttactttcatttctcatttattttggaagcagcggagcatggtcatgccatttctgcatcatgctgatatattcattcttatgatttaatgaaccccccacccccacaatttgaaccaaacaatttccatcaaaacaatactcccctaaaacctagaacaaaatatgatataattgatttacttcactagggttcaggacaatattcaatcatgcttggctcactgcaggacaatgctagtcattctctcacatgattgaatattatcctgaaccctagcgaagtaaatcaattgtatcatatcttgttctaggttttaggaaagcattgtcttgatggaaattgcttggttcaaatttgggaggggggttattaaatcatgaaaatgaatatatcagcatcatgcagcttgtgaaaagctgcaggaaatgacatgaccatgctcctctgcttccaaaaaagaatgagaaatgaaagtaaatgacaaataattttgaagcattggtgccggtgggattattgaatgatgctaaatagggataagtgcagtaataagaaattgagggcaagataagaaaagtttgcatccaagaaaaaccatgaatttatttctagcccagcctcattacaagccaaacaaagtccttcaaatccacattgtgtgtatggaatgatatgaaagtcaaaagttgggaattgtgttggttgtttatatgaagaaaacacttgtatgtatgcatgagagaaacagtagtcatgaggataagagtttagtcaactttacttgatacttgtaatttatttcacttctgatgcccaatacacgctcatatctctaaatgtaatgcacattaattcaaaggatttgttggttgatgcatgtacagtcatctctgtcactatgattgatacttattagacaaacactaaattgattgaccactgttagtttcttttgcttgagtacaagcaaaactgtaaatttgggggagtttgataattgttattcaagagtattaaatgcattaaaaatgattttttttttgcctgaacttattcctttggctaaaaatgaatctttttccatgtctgaattttgtccaacactactaactcctttggttccactttgaaacatgcattgtgatcattcggatgtttgattgcatcgaataaattaaaggtaactttctaatcatcaacactcatttccaagttatcattgcccatatcaactacacatttggttgtcaacatgaaaggatgacctaaaatcagtggaatatttgcatcttcttcaatgtccaatataacaaattttacaggaaatgtgaattgacgcactttgactagcacatcttcaaccacgccataaggtcgtgtgatcaagtggtctgcaagctgaagtgtcattcttgttggtgcaatttctaaattccctattcttatgcacatcgaaagtggcatcaaattgatgctagctcccaagtcaattagtgtttttcccattgtcactgtccctattgaacatggaatggttacacttcttggatccttgaattttggtggtagaattctttaaataacagcactgcaatttccttccaccattatactctcattgttgatatatttgccctttttggtgaggagatccttcaagaacttgatataaagtgacttttgctgcaaggcctctccaaaaggaattgcaatctctagcttcttaaaaatatcaaggaagagagcaaaatatcgctcattgtccttcttagatggcaccaaaggatatggagcctccttaactgggttggggactgcctttctttttctctctctagccaactcacttttagtcatcctttctccaatctctttcctctccactcgttcgatctctctctttttatttttctcctctttttcacttatttctctttctctcatttgctctccttcctcctgtttttcctcttcttctagctctcctttcccactagcattctcccttgacttctaatgatcatagttgatcgttgactgtgtgctcttatgattggacatagaaacttgcataaattgagtcagtgtgtcctctaatttggtggtccactcatacaaattagggccttggttgggaggtcgattggatggaccttcttggtctttattaaacttatttccagagtgtgatcgccaaccttgatcttggttatgagaaaaatttcccctttgctgagaaaaatttcgcctattctgatttgccatgtaattaacctctttagatgtatcatcttgattcatacatgcaccaaactcatgagctccttctcatatgctgcaacctccaacttgcatgactgttgaatgagtcggttgggctgcctgcaactgttttggcaatttacttaaagtctcagtgcgtgattcaagctgtttagctaatagcttattctgtgccaacaaagcatcctgtgatgtgagtcccaataaacttttctttgtaggaatatgagtcctatcacgcaatatggcatggttgctggttaccatgttttcaattaattccatagcttcctcgggagtcttcaatttaatttttcccccagttgaagcatctagcagttgtttagattgggggctcagaccatcaatgaaaatgttgaactgaataggtttagtgaacccatgagttggagtcttccaaagcaaaccacgaaagcgctccaaggcttcactcaaggattcgttgggaaattgatggaacgaggaaatctctgcctttccctcagctgttttcactcaggaaaatacttctttaaaaatttctcgaccacctcttcccaagttctcaagatattttccttaaatgaatgcatccatctcttggcttcaccggctagtgaaaatgaaaatagattaagtctgatggcatcttccagaactcctgatatctttacagtattgcatatttcaatgtatgttgctaaatgagcataaaggtcttcatttggtaaaccatgaaagagatttccttgaatgtgctgaatcaaggaatacgggtatgaaatatttgttgcttaaacttctagtcgcgctatgccagtgaaaaactgcggcatagtagaactagaatagtctttaagagtcactcttggtggttgatcttcaggcattgttttttcttcagatgcaccaacttcaatttctcttagttcaatgagaaatgatgaagaagatttagatgaaggaattctcccgtcactgaggtcagttgtcctatcctgtaacactcttcttttctttgttgcgttgtttcttctacaagtagcatcaatctccaaatccaacggagctaagtcctctactggagttttacctcgcatgcaagaagcaagctactacagagcagttaaccaagacgagattaaatcaaattgaaaataagtatcagtacaaaaataaatcaatgaacaaaaaaaattgcttccaaactgtaacatacacatcaagtaaaaagaaattcttcggcaacggcgtcaaaaacttgttagacgattggcaagtgcaccaattcgttcaagtagtaattaaaacagtaagacagagtattgtgtccacagggaatttattatacctcaatgacgcatattccatttgtaaccaattttaattgcagtaaagtaaaatgaaatagttcatgttttccaatgattgtagtaaatttttttcagcttaagaaaaaataacaaaaacaaacagagaattgtaaaatggaataaatagcaaggtgaatgtgtcagggagtattctactgaactttctcttgacgtgattaaagaagtttttctctatttaacattatcctaatgttctttgcactgttaaattacactagctgtgattcctcacatgaaagagcctagccctcctagttttgttcttgattcctcaacaaattcattcttagcgagccacattacgaaaaagatgcagtatttattagaatacttcacactattcctagaaacattttccaatacttaaatcctaacaaaacatataaatgggtgatcaagccacaaatatggaaaataaacacagatagaagcagaaaacactagcaataatattaaatagatagttaaaatttttacatcaagagtgcttagtgaaaaaattccccaacaatgaagtgtttagccctccattagcaaggagggatcaatacaaggatgaaataagatggaaatggagtggtgaagtgaaagtgtaaagaaaagtgtcttccttcaaccttgatgctctgttccttctttcccacgcttggtttccccctcctcttccagttttaaagatttttggacttctcagattatgaatgtgcgctcgacgaacatgtctcgctaaacaagagttagtgactggatgcttggtgggcttggacgcgctaagcgtgagaagagacaaaagctttgctgggcgggctggctgtgagcttagcgcgctgctctctgatttaacattctctaggatttttctctcgctaagcgatctggcttccttgctaagtgaattagccaatttggcttgctgagcgagctcttcaacagcatttctaaatcttcttttcttcagcctaaaaatttaaataatttcaacattagtcattcaaatggagcttccattgtataaactcacacaaaaatcaattatttacaaatctcacacaaaaaatcataagatttgaggcacattcctattttttatccatttttaatgtatttagtactcttgaataacaattatcacatccttatagtatacttattcatcttcctcgataatcttacaatctattaattatgaaaaaatgattttttttgcctaaacttattccttttgctaaaaatgttttcatgtctgaactttgtccaacactactaacttctttattttgttgtcctgtgttgtcttcttagaatggtggctccatgtactttgtctacagtttgaattctttcttttagttgatttttttaggcctggatcttgaataatcttgatcatgattgtttgattcactttcagttgaatctgcatatgctacattttgccttcctggccttaatctatattctttaagacatgttttctctagttattgaaagtcctgctttgacaatgtcaattctattagcaaaaacatttctgggtatctattggttaaaatttattgaaaattacaaatcaagagtgttcaaatgagtgtgttattggtaaatgagtcattaaataataggtgaaattccactaaaatttgcgattttttaataaatttcaaccaataatagagtgttcaaatgagtgtgttattagcatttctcaaaagatatagttgtgtagcataatatacacaataagagaaaagtttcttgaagctttggccatcataaaggttgagaaagaaaatatgaggaacccgccatagctaggtgtcgtggtgtgagggagaagccggttttgatctgtttgtgtggatctcacaactttggaatgtctgtgattggcgaactgtggaaacaaaagtaattacccccatggttgaggtaatgtccttaacatgacttacgagttacgaccggtacatggatctatctatgggtgagatttatttaaattattttagctctacttgctgccatttttataccctaatcccaaaactggaccactgatttactaggcataaatttgaaatgttgttctcggcgttctataatataataatgcaatgtgtactcaaaatggaacttgaagctaagcattataaatcttatgcacaattttatcatctacacttcatttggttgagtgcaatttgggcaagaaattcatataagaaccgaaatttttatcaaaatctaaccccttttccaaaacattgatgcatgtatgtcagaagaaaattcttactcataatgggtcgaaaaaagaggttcttttagacactttttctacatataaagttgtttctatgttgaacaaatattttttgttaaacgttgacaaaattatgtgtggttaaaatcaattttgatgtgccgtgattaatgttgaatgtttcactataaattttttttatccaacacaaaaactgtataaagttaattgaacttaaaatcaattttgatcttagaatcaattgtttaacataaaatttaacatgtgaaaatttacttgtagttatgttaactaatatttttaagtgattcagttgttgtgttggaatattcaagtagcttatgatctacacaaaattaattatgttggtatctttcttggatttcatttgaccaaaacaaacacattcaataaaaaaaaatcgtgtatggtgaaacatccaaatatttttgtcaaaaacactacctacgttcgaccaaaatgaacttgtgatattaattttttaaaaacctgtaattgaaggtaacaattgacacttccatggtcaatggaatggtaacatgtcttcttggtttgaaaatagaaaacacttgaagtaatgggtaattcaatttatgaaattttattttgttgtcattattaatagttgaaattaaagaaagctcaaataagttcataaatttcttttaggatttcattttatgtctctaaagttaaccattttttttgttgttcctagtttagaggctcaagtgataacaataataataacatttttacggactaaaataaaaacatggttaattttatggatctaaattaaaagtgttatttaaattttctttaaaatcaagaattaatatgacaataagatataattttcgagactaaattagtagtttaatcattttatgaagcaaaacaaatagcatgttacaagatagtaggactaggtatcggctttcttcatttctatgccttcaatttagccatgttaggaaagtagagttggaaacttatgactgaccaagatgctatagaaataaaggtgttcaaagctaaatatttttctaatggatactttttaagttctagcttgggtaataatccaaggttcacttggcttagcatatatgttttacggctagcggtgagagaaggaattagatgagattgggagatggctccaaaataaatgtatggaatgatccttgacttcaagcagttgatagttcatatgttcaaagccaaccaatagaaggctttgtggatttgcgtgcttttgaacttattgatgcaaattcaaattcatggcgagttgatgtggtggagcatatctttaatgctcgagattgccaacaaattatgagcatgccaattcatttcaatggtgatgaagacaagcttatatggaagttgagtagagatggcctatatcagttaagtcttcttactatcatagaatagaatccataattgataattcacactttctgacttttgagagcaaggagattgtcagcttttatggaacttgaatgtgctttaaattcaagattttcctttggtgcttagctcgaaattgtcttcctaccagattcagacttaaatccacaggttttcaatgtcaaatgacctaccccttttgtgatagcaatcctaaaacaaaatgtggtatgtgttctttggttgccattactctttaaaagtatggattgaggctgctttgtggccacatattcagaattttattgcaactgcagaatcaatacatgaatgtgtatttcacttccttaaaagctggaatggacaacaacgtatttcatttgtatctaccttgtggtgtacgtgggggagacacaatgagaaagtttgggaggcctcataaaaacctattcatatttccttatccattgctcgtgactacatcatttcctattagggagtgagatctcgtaataaaaatgaataagtcccatgcaagcacagcattgaggataaaaacctccattaaggcgcttcacatgtaacatttatgcaactattggtattgattctaatgcttatgacacaggcgcatgtcttcgaaatcattaatagtgtttggatgagaaaattttaaattttgagaaattttaaattttaagaatttcaaatacttcaattgaaattcttttatttccaaaattttgtacttggatgaaaaaaaattaaaattgtaaaggtgaaagaaaatgaatgtaaaaagaagagaatatatgtttggtgtgctttcaaagagaagaatattgatgtggagagtcgcagaggaacctggacacgatggcgtacatcacgatacccgaccacaacagaaggcatggtccaggcccttcgtgccagcgagcacctccatcgcatgataggcagcgacgactactcacctaactagtgagtgtagttctacatgtctccttcgcctgcatttaatcgacactccgcgagctcagacgatcttgaagaagcgaattatcggcgtgaggaaagagtcacgagttcgaaaacgagatttcggaaactttcaagtgaaagagataataaaggttataaagaaaatacaaaaacattttgaaaagatattttatcaagagaatttcaatttcttatcttttaaaagaaattaaaatttcacatttttaattagttaaaattcttttaaaatttcaaaattttaaaattttttataaaaaaaaatccaaacaatgaattttatattaaaaaaaattaaattctttaataaattatttttctcatttaaaattttctttacaaacgcactctaagtacattttgtagctactttgacatcgtggtatcaaggttttctactagttcatgaagctgaggcaacaggtcttcacacaactctgtcttggattgcagagatgcatcttcaagacgtttcatttgacttagactgcaaacaagtaacagatggcatcagctctcatcatcctatcaattatgaatttgctttattttatcattgtgtaaagaaaacttattccactaggtaacttttcattaagttttgtttgtaggcaaacaaatcaagtcgtctattcttcaatggtatctagattttatgctagtccataaattttttataatggtcccacttgtattttttctttgagggatgctccccacttgtattgatgtcgttattttgaatgaaatgatataatcttgttacagtggaaaaaaaaagtttgttcagaatttgaattcataagatatactaaaaacaatgagcattgcattgtaagactcatgttgaccacccgtaccatccgtaacaataatgaataatcaatactacttaataaccaaataattgatactaatatgacatggaataaaaacagtaacaaaatcaaataaaatcacggtggaagcaaacaaatcagtataaattgaccaaaccaccctttctacctatcccaacttcccaaggcgattgattcaaacagaagagaaagaaatgttttcttgagtcttgacctttaaccctttcttctcactcactcagtactcactacacactctcacatcgcaacaacaaacagcaaacgcacgcaaatggatccgctcagaggatccgaacccgaaaaccctattgccacgtgtctctccatgctgtccctccgccgcttctccgcgtgccgcgacttcgcccgccgcctccccccctccgactccgtcccccgcgtcctagccgtcgccgacgtcctctccgccgccgacttctactccgtcctacagctccgcccctccgacggtggcaaccgcgacctcgcgcggcggcagtacgcgaagctcgcgctcctcctcgacccaacgaaccccgacaagctcccgttctccgacgaggccctcgcacgtgtccagaatgcctggcacgtgctctcccaccccgaacgccgcgccctccacgaccgcgagcaaaacgcaaacctaaacccgaaccctatgacggcgtcgttttggaccgcgtgcccctactgctggggcctcttcgagtacgagaagaggtacgaggatagagcgctgctgtgccacgtctgcgggaaggccttccagggcgtgccggtgaagccgccaacgaagacgggcgacgccgtcatggagggggaggagctccggcagtactactcttgtgaagctagtgtgccattgatgtgttacgaggttatgggtaacaatgtattgggtggacaaaatgctgcacaatatgtctacatttctgatgataatgataataatgatggagggtttgtgagaaatgaaggtttgcaaggcagcggtgagaagaggaggatgagggtgaagaccgtggcgaacaaggttggtgggaacaggacgagaaggcatcgatagtgactcggatttcgatttggataggaagatggggaattggagttcactgaaggagatgatgatgtctttgttggtgtgaagtttgacaagtgatgatgcagcaaatgggtgatggaaattttactgcttttttttttgctaattctaggagcagcagcatatagggtggtagtgagtagtgttttgggatagtgtttttgcacagattatttgtggagaaactactaaaaatagggaattagagtataggtgttgatttggggtttcgtcattttggtaaagaggcattgccttgttcatattttaccattttggtaatgccctttttgatttgatgaccttttggaaattgaaaagaaaatacttagtctccttattaatctgcatttctgttctctgaatgaatttttttttgtctgcttgttagttttgtggaagcaagacgactagttgagtttcatttttcggtttttgttggtaatgatgtctctaatcaattggtctttgctaaattgttgctgatggttactagggtctaggggtcaccagggcttgtaagtgaactagttcaccatgttgaagttgcctaagaaatgatggaattatagtgattttcacccccaaggtaagtgacttgaatttttgaagccaaaaattgttttggtggtttagctcaaacggttgctaaatagttttggtttgtcttggtttgttttccaccctctgtccctctcatcaagacactgcacaaagacaacaaaaatgtataaatagtttttttttcatcatcttttatgaatattcctgttgtacagcgtttggctctcatcgatatttcttttcagttgtcttatatcatgcacccttcttttgcctttcaactcattgcaaattcacctctgcattttgttttgtttgaatacttaatggcatggtatgactttgccaacatttgctatttagattgtacgagtctggggatcattattagttcttgatctttgctaaaagctgtttgatgatctaaatagcagagtaagaaacaacctagtcatatgggcaataacataactggaaaagaagtttaattttctgcataaaataagtgaactactacttttgagaattgttagctccttcataaagtaatgactaaaattagtttagacacgtatcttaatggtacctcattacttgtttaacctcttgctttggtagaactttgtgtcagctcattattccagttatcacctggtcttcgagtagggtagggttatgctcagttggggaacccgccgggtcccattttccttcacaataaccagatgaagtagtggataagctgtctggtcaacattgtattaagctctgtccaattgtgaggatagaattaagatacgtgtctaaactaatttagtcattattttatatcgtaatgagtgtgttctaggaaaattgtaagaaatagttttaatatttcttttttcgctcaacctcgactcagacacgcctcacacacttacccttcttaagtatttcaatttaactgatgctaatttaagagagtaaaatatgtttttattttaggttggttaacttatccttaagtaaaaaatgggattaagggttaaacaatctaatcatagatgacgggtgtaattctcgtgtacttcaagatggttgattgcatgtattaattgtgacaatcatctatcttagggttgtttaattttatttttatttgggataagttaaacaacctcttttaattcatataaatgagtttaatgaacatacattattagtatttttttatattatcttatcaaccaataaaaaatttaaatttttacatgatttttgaaatggttattataaacaacaaatttacaatatacgatcaattgtaacttgataacaatgtgaaagaatttcgtctggataagcacaaataaatacaaaaaaaaaaaaagagaattaaaaaatagcaaaaatcatttaattttgctttcactctgaaattcaaaatcttatcttgtttctttttcattcccaatttgcatctcaattagatttactagaaaaacattaaaatgaaatgcagaaaaaaaaatagaaaagaagaaaacaataacaaaacagaatgtgtagaaaagatggaggtgcaaatgaaggctccaactccagaatgaatccaaggcaaatttcctggtgtttcctgcaccacagcacttcaaatccgaacaaatcagcctttcctccaccttgattttgcacatttttgtcttattccagcatctcttaaccactactatctctcatgcagcatttttcacaggagacaattctccttttacggacatgacaaatgattttgaaataacaagagggacgagaagacagtagtgagttgggggcctgaacactcactttgattacgtctcttcatacacccaccacaagggggcacttggactagcacaacaatcacagtttgggacactgagttttgctatagaaataatctctccacacttccattacaacacgcatacctaacctttacacaacacactcaacttatattatttattcaaagaatatagagatccctcactttttcttttctttttttttaattagacaaccataattttcaattttttggtaatggaaacaatccatcctaaccattgatttaacctagggatatttgagacgggagaaattttttcttgcccaagaattatgaaacttagaaattatattttttggaatgaatcaaatttgtttggttaacattgagaatttttagataagtttcttaaagatcaaagaattatctatatttttattgattattttaattatttatcacattatataatttaataaaaaataatatgatatttttactataaaaaaaattaaacattaaattctagaaagtaagattctcatctcttatgtggaaaaaaattgatggaaaactgatttaaaaaccattccgaaaaatatcctttcttaagagtgttattcttttataataaataccaaacatgaaaaaacaaatttcaaatttctcaccaatgattcccgataaataaaaaacttctttcctatcaaatatcttaataaaaaaaatgttaggaatacattttttattaacatactcatttttattattggttaaattttattaaaaataataaaattttggatctcacattatatttaatttatatttaatgattcttcatctttcttttataaattttagtaaattttaacaaaataaaataatttcttgtaagcaatcctcttaacttaaatcttactaattcttcatggaaaattcaatatcaaagaaagaaagacaacacagaagacttgctgacccaacattgctctttttcaagtcttcctaacccaactatatgcaggaatgaatcatcaccaagtcgcaccatggtgtattttaacacccacagcgccgtaaaacgccacaaataaaataatcacaatcaacgataaaaaaaaaattaaatatactttttttctaataaatatttgatttttgagtttgtttcttaataaatttttattttatgatggatttttaataaaataacatttttttcttgatacttatatttaatcctaaataaattagcgaattttgtatttgttgtagaataaattctttcatttgttattagttaagactaaaataaaattaactaatttattagagaataaatacaaaatttactaatttatgaaagactaaaataaaatttcaagaaaaaaaatattattttattagagacaatataaaacaaaaattattaaaaaaacaaataaaaattgaatatttattaggaacaaaaacaaatatttaagagggtaaatcccaatcataaggttattctattgtaaaataacagtaaaaataaatcataatccctacataccaaattaataccccaaataaaatattaatataataattacaggcataacctggttcatgtgtaggacctctgccttgccaggtctcgtgggcccatcctgctctacaaccatgtgaatacgtatgtggtaagaaaaataattttctcaaaaaaatatgcagattctctagtgggagataacatatggaaatatgagattaaatcaaggactttataatgaggatcttaaaattaaattctacaacatgcctcttttaaattctgatagtattctgattatcttctaatttgccattattagaaagaaatattttcctaatcttattaaattgcaaaaatatgttttagacttgcaattacacccttcaattatattcatttaagaagccccattttcttattataaagaaagttgtgaccaaaggcaaaacaagtagcaatcttccacttttggcgtcggttacattttacttacctcttttagcatacaatcttccgtaggaggcaaatcagttcaattccatggctttcattcgacaggtaataaggttactacaagttcaactgtttatagataaattaaaatttgttttctttcttgtgttttactaaaatagttagtacagggcatgcaacatgttcgaaattactataactcagatgctcaaatgataagaggtggcttccatcagacattcatatctaggacatacaaaaccagtttcttgaagccgagatcaaaggtagagatcaaactattggctgctaagaaacacagtgaagcagaaaagagacgtagaatgagaatcaatggtcaatatgaaaccctccgaaatatcctccccaacataatcaaagtaagtgcctgacacaagtatcaaacagtttatcatgccttggatttttattggggttcattcctaaaaatgaaacaaactatgtgaaaatgaaaattccaacatttatttttgggtgaaaaatatgttcacgattcctaaaaaaaataaaaatattagtttattccctataaaaatttaatatgttttcagaccttacatctaccaaaagtcgcatggtttcagtccttcaaatgagactaaaaacgtgtttttgttaaatataagatctaaaacaaattaaattttaagaggtttgaaatattttggcagaccaataacatatccaatcctttattttttggggtaaattttacaattctgtcattttgatttttctgtacaagcatgctggatttagattttgttatctactaacagaaggacaaggcatcagtattggcagagactatcaagcaagtgaaggagttgaagaaaaaagtatcaaaactggaacaagatagttctagtaatccatcaaaggatgttgttaagtttcctaatggaacagataagttgaatttggaaagatgtaacaacgacgagggcatagtgaaggccacgctgagttgtgaggatagactaggattgatgtcatcaatatctggggcactagagcaagtgaaagccaaagtggtaaaggctgagatagtgagtgtgggagggagagccagaagtgtgttgtgggtgcaaggtcttggaaatgatggtacggggacgctcaagagcaaattgagggttgcaatgcaaaagccacccaagatgcagcgttttactcagtaactgttttgtgtccttgattctaacttctaatgatgaaggaatgttgacacagttaggagctataacgataagggctaatgacaagaagatttttctacttttgaggattatataataatgatgatgactttaggagctttgtagagcccatggctttctcacattttagtattactgtatctccttttgcaagcaaaatttagcttttacttgtatatgaatatcatgttcgactcttcatataaagaatataataccttgacgggttaacatgtaatgtgtgtttgattatggatatggaagcttctagttgttactttcatgtattctctcaacgggtgtgatttactgaatgcagggaggtatttccaaacacactgataaattgtaatcactttaaggctagagtacataataatgggacagattaacatgtaatcacttttgtagtttgtccatgagactagtttggtaaaccgtaaatagccccatgttaatcactagctgtcatgacctgagttgtagaatagggaaagaaatcctgtgagatatgtccataacaagatcacaaaagattacatgacaacagacatagctccgtggtacaaaaagttacctttgaaagtctgaaactccacgaagtaaaattgaatccaatctcaacggaagattcttatgaaatgattattgactgcacaaacctgattataactggtgaattatcactcaatttatttttctttattcgttttctcattttgttgagagttgttctatatactattgaataaataaaatcattcgagtacagggtgaacattgaacaggaaccctcattctattttggattagagaaatactaattttcttcactacaccaaaaatatccaagatgattgcttatatctaaactcaaactcaataaaacgtttgagcttatgcatctccacttattcttctcacatgtacaccagaatttttgtcataatggttagcagtgatatatcttttaaggtcaactcccctactgccactacgatttttgtttttgttagcatacaaaactgctttatcttctgagtcctgccggcgccttctacttgcaccactactatcaactaagaaatctgtatccaagttatcatgggaggaagaagcccccatgttagatgaaagcccatagtggctataccaactgggtcccacctcaccaaatatgtaatccgagaaatcagcagaactggctgagtccttgatacttgcagtactgcaagaacttgcatctgaagagctgaaaagtgaactttcactagaagaatccaccattgtatttgttcccccatactggaatctccattcttctggatatgcaaaatcatttcttaaggaatcatcgccatcattccagttagggtacttgccatgcttctgctgtagggagggagactcgccgcttgtagccatggaatttgatcttgtcttagaagaagcaggaatggcttccaggttcctcctcttgaactttccagcagaagatattacattgctacttactaaacccagtggctttggagagtgcctgaagatttttaaaattagcacaagacaacgctattattagtgctgagacattccacagaaataataaacatatcaaaccagaaattatatatcaacatccaaaggcccactaccttgcataaagaagcatgtatgccctttctgataagactctcgacaattcaacaggttctacctaaataaaagcacaaatgccatcgtcagtttacatacagaaattcacttcttaaatgaattatgcagattgatgatattgccgtcacttttacaaaatgagtatcccaaaaattaatgacacaagtttaggaaataaactttcaatggtatttcatagaaatttttcaatggtacttctttaaatttgagaaacaaaaggcatcagaagatttaaaagaagcacttatatgaaatgacagcatcatttgtataattaattttttcaggggaggttggggaggggaggagacattcagatacagaaaaggtatatcaggataaaaaaattcaccctgctgtcatcagtcctgaaccattctccttggatgttcttcacataacagacataatggcctgaaaatgcagcattcatgatatccaaatggacaaccactgcataaaggctgtataatggagatttatcttttgttccactcatatatggagccatattcaggacctcagggaactgaaccgacttattcaacttctcgaagttaccagactgccaaagtagacagcagaatatgcatgagatacataatataaaactaaaataacagtcatagaacaaagtgattggataacaagtaagacttcaaaattaatattggagatgtacctgaaatcgttttaatacaattgtaagaatatttggtgcctccaacactgtcaacttcttcctggctttctcgtatgttttacatctggacagcaagaaagaaacaaatacaataatttaatattgtgtttgtgtcccacgtaggaaaggaaaaataacctcaaaatatcattctttcccctcttaaatgcatgacatctgatgtaacactacctcagtcttgataaaaccagaataaaaaaatgtccacataaaatcacaaaaatccagatgacagactatgcgttgtactcagtgcctaaagttctgaatatctaatattggaaaaaaccaaatcccgcattgactatagatagtgaaaagatagaatatataagtgaggacaaccctcaccctatgagctagtttttgagattgagttaggccgaaacccacattgtaagatggtatcaaagcctatcccagatccattaaataggtcacccaccatgttatccacgcaccagtccaaaagtgttggacgtgagggagtgtacgggaaaaaactcaagtcccacatcgactatagataatgcaaagatagaatatataagtggaagcaaccatcaccctatgagttaacttttagagttgagttaagcccaaatccacattctaagatctaaaaagttgagattgtacaatcttacaagttgagggttccctaacgtattcaatcactcaaggtaatgttggcaagcaagaccaaagtggaatcacaatcttcatcatgaacttgtgggatcgttgatccccagcaaggaaaaatcagacccaaatcctaggtcggatcctttgacctgattttaaaaaattcctaatttccttttttctcttcgtttgcaactcactcttgaactcccatctcatttcatctgaaaccaacaaccctcaaacttctcgcttctggtaccatccgcaaccaccccacctccaccctgcaccgctgctaccacctggcactgacctttggctgtacaaattgcaaactgcgagaacacatctggttctgcactcagtctcttctcttccttctctcacactgtctctgctctcttattgtcttaatgattttagattaatttattatatatggatcttatgacttgttatgattatgattttttcaagtttgtttaatgttgtgatttagaggttattttctttatgaagttttctatgcaaatgtatataattataattttgcattttaggtaggaatgtaggatctaatgattcaagttatgagcatttacccctcccaatcataggtagaatctcaagtttaacaacattgactatgattacatctttagtttaatgaaatcgcattagctgaacataaaatcctattatgttcctaaactgaagcaataagttcatcaaacatattacagaatagtaaagcataatcacaaggtcccacggaattcttcttccacacactctacaaagtattttgtgcaaacttctcatttttcttgaaagagtagcactccttcaggtagaaatcagaggattgtaaaaaccatttaaagatgagtcttttaaatcaatttgacacttgacaggatttcataaaagcccagtaggccactagaccatagattcagggttttaaatagcagactaaagcagcatagcggggtggccctgggcagcttcaggggttgcagtagcagagtaattcagtttagcgaccatcacaggtgaaccatagcagacaggatagctgtgttatcacttgattccaaagatgtactctgaacactaacattagggcttgcttgggagctatttttgggatttcaatttccaaaacaatattttgcttataaaatcaatcaaaatgctgtcatttctcattttctctctcaatccaactgtcacttctgtgtatgatgtctctcaatctcgaccttgtttctctcttgacccagcacttgggttactggttcctcacattctctgcctgtgatttctcttctccggcaactagtttctctgactctgttttctcagaatagtgactatcctgttataacatttttggggccggccattacgtggtgggatttaaaacactgtataaactcgcatcagaaaagcacttgcacatttctacagcttctggtcaacttaaccttccaacaggtctaggacccttccttctattacttttgaaactctacacagctttgttaatcacttatacacaatggatggatgaattgtataatagaactatagtttcaaccaagagggatcatattgcttattcagtttaggaatttaacccgttagttaaaaactccagaatctaaatactgaaaaattttattatcaaatcacttatgatcttttcaagccaaattttaagtgcaaaacagaaattaattaatagtagtaaattttaatatgtatgatgtagcattgaaaacaatgaaacaacattaaattgacaaataacttggctataataataagcaatatattatacttgctagggaaaaggaaagaaaagaaaaccaagcatatgggaacattacaagttaaaaataataggctagactggaattggaataaacatgaaagtggaaataacaaacctgctgcagttatacttgttatctttatccaagatttcaggtgctgtaaattgtccaagagcctcctccaaagttccaatatccccatcaatttcaacagtaagatccatcattctctcgtacctctcagatttccccaggcatcttaagcactttatctgcaatttgcaccaaataaatttcaatatatagggaaactatcttcttaccattctgtaaaagttgaaaatgtgaaccttgacaaaaaatagactgttcgactaggaataaccttagatcgtaaataacctccaaaggtgtaaccaactagagttgtttcttctgccaaaggacttgaaacaccaacttccttgagacaaacagattgcattgtatcaaccgcgcacctgccagttaagcaatttattatgtagacaaattcacgtataaattcaagatggcttcacagcttaagcaattatttgcctcacctcaaaaattcatgagcgtcttcttccttcccacgcccaagatggcttccaatcttgtgtatcttagataatatcccaattggtgaaagtggagaaatcccttcttttgccttctgaattagatattcaaactcacatgtaaaacaccatcccttcttctgacctagtgaacattgtgaagatttaattaattacaagatcctgatagttggacaagttaaatcatgatgatattattaagtggaacttgcatcgttttgaatggaatccttgaaaaagatatgaagtcagaggccgagtatatgctaagcactggagaactgcattagcgtaacagctgcagaagaggcatttcaattagcaaggtaattaatgctgaataaagaaaagttacacaaacaagcactagatgtgttttcccttgaacgacatgaaacaacaaagaaacaagcaatgaataccagtatgaaagtagccatccagcaactagaatgtttcctagatgttgttctctcaaaagtttctttaatcacaattaccatatcctattctcataattataggaccaagagagtattcaaagaaaaaatgaacaacataaagctccaaaacaaaataacagactcctaactatttccttccttcctcatgatggaggtgcaaccagtccatctaatgatcctttataggggattggaggtcctatgacaaggtccaagactaagagaatgaagcaagtattgcaaggcctgattctaaagatcaaggagaaagacgaccaatgtgaattaagggctgcacctaattgggtcactctcctacaaattgatgaagatgttttaaggccaatttaaagaatcactttgggaagcccaatttacaagacaagaagcatccatgggctgaattgattaattttggtggactattaatattgggttgattagataataattaagcccaacatgcacaatcttttattgttattttaaagccttttaattatgggcttgggcctaaactaggattattagtaggagtataaatagactccttaaactctattgtgagagtttttcctttgttcttgggttaagaactgattgcgttggttccaccggtaggtcgctgtgagggtcacgctccttttgataactttggttctgccggcagcggttagggtcaatttatacttgttttcaagacgatcctaagtgttctattatcatcctcccttcctctcactagagctataacatattagaccaatcaatgagaagtaaaaataaaaaatacctgttcccacaatttgtaaggccaaaggggaatagcttcatcttgtcataacagtaaagttccacaaagagttcataaggaaagcccatctaccaaaaatatacaatttgtaaatcaacagagacaaaattattatgtaaaacaataatagttattttctaaagaaacaagtcaaatctattttcaacctcattttcagcagatattgaattggatcttgactcttttgagcttctaaactgctggacaactttctgcattgatattttcagaccactacaaacattttgaggcagatttggaacagcactaacttttgcgggtaaggtatgacaattgtcagtttccatacacttggactgtgaaggaaaatcccccttagtagctgaggatagtcgttcacgagaactagatgatgatcttcgtgcttctctgtatttgggcaaatgagattcttcttctacatcatcaattacaacatacttacttgaaccactcaagtaaggcacagttttgcatttagaagtatcttttgctaatttttcaactattgcagcttttcttctgcgttcatggctacccaaatttgctgcctcatcatgagatgtgtcagattgagttttgggaaattttgatttaaatcgagtctcatcagtagcgttactatgatttgacttgcttcttttacttgcacttgaatccttaacttcaatattctcagaacatttcatgttaactgtttgtttgttatgaggggaagcaacacttgtatcatcagtagtatcattgcagacaggttttgcaaatctgctgcgatggttatcatcaaaagattttcttgcagcaaccaaaggatcaaggctggaatacgaatcattggaagatgaaataccagcatgtgttccattaatttctgcagtgaatctaggtaaattataaaacatatatgcatgaaataatataatgagacttgtaatcaaaaccattaccatgaagaccagactctgttttggacaccgatgccctgctagaaagattttcatctttgagctccatggtggtagttggaggacaacattcgtccttgtgaccttgtctccagtgactaatttgacacttacccgaactacaagaaagcatgtttgtgagaatgaataacaaccattgtaacattataagaggctgaaatgatggcttgacagacatgtcactgaacagagaagagacaggcaaaagaaactacagatattcacaaatgaagctacgccaaatcattagaaaactctcactactgtaaagacgacaaatcaagctctaaataaacaaacacattccaatttcaaacacaagaaaaacattaaaagaaatccccctcaatacattccattatttttttgtcgtcaagcaaaagggaaagaacaaaagctactaacttcagaggcaatgcaaacacattatagcgtatttggtcccacaatggggatgttgtttgcacattaagtcagaagcaaatagttttagtgcatgttctctaataaattcaggtgaaattgctcacaataacatactctagaattggcgtggtttctctcttctaaactgagtctccgaacatgaacttcaacagaagaagtgagaaaacaagccaaattaaatagaaggcaacatacaaggtgaaccaagccaagactattggacacaactcccacatccaacaataaagtttttccaaactagtacgtacccaagtatcatctcaatgccccttgaacatgaaacacactaaaattgaaaccaaatcacccaatgactaaattctccacccctcccccaaccaccactaatccctttcaaacaaaggctacttctaactaaagagcagcaaaaaaacaaaatcctttctcatttccctctccattgttcctacttcctaccctttgaggttaatattaataacatagcatagcagttaaaacacataaacacgaagaaagaacacaaaccaatatctgacggccttgcagcgagaacatcgcatggtagtgggtgcacaacacatcgcacattggtaccaccgagaaccattcaccggagccagagaagaatactccacctccgacgccaccgccaccgcctcctcagcaacctccatctccgtcacgtcagcatctgccaccaacctcatcatcatcaccgcctcctcctccctcttggcctctgcatttctccacacgtgccgaatcaccgcgaaacccaacgccaacactagatacaccagacccggaaaccctaaaatcccgggcaccagcatcgctctcttccactcacttcaccttatcccgcacccaggatcagtcccgaacagagaatccacagcgtcgtaatattgctacgcatggatagatagatagatagatagataacctccacctcctccgccgccacggacaacaaggctccgccgagggacgaggaggttcggttcccggcaggggcacaatggtaaaatcaaaatccccagaacctgaccgtgagtgtgagcatcagaaaatgaaaatgaatgaattgattattgattccggggtgtgggctcagaaatcgagttgctttggagtttcgattgaactcaactcagattgtccaattgcgaatatgcgacacagcgacctctttgtcgtttctcttgtcctccgggacttgccgtttccacatctctccttgcatcattctacagtaacttctcaactcttattttttttttcttaaaaaaaaatcaaataaataaatgctagtggaaaagggattgtgtacccactattgctcaacattggattaatggtcttggtgttaggattggatttggatagtagaatctttatacttggaaagtaataactctcactcacatcataagagaaaaaaacataaatatgtatgctctttgaattgggtggtaataatagtagtattattagttaatgccacaataagtgggtcagtgaatggttgtgctgctgcttatatatttcaaagagtgtaagaatgatctatagatttttttttcctgattttaattaagggtgtataaactgtttgttaccaaattgaatagaaatagtaatgttttgggtttttttaaaataataatagtagtagtaaatggtaatgtaatttttttcatagtttaaatattttgaactagtataattatttttttctatgatgcatatctaataagcaacaatgagaatcttttgagtagaaaagatatatcttagacatttaacactcaaattaatatttgacaaattaactgtatgatacacatacaaaatgtgtacctaaaagaggttacaatggatatttatgaaagttagtaatgtgttttataaatctttcattaatttgtcatgtatgttcagaagatcgttaatagattacgttaagtaaattatttcatgttcatgcacgacattcatgtttgtgttcatgtttgtgatagtggtagttgcatgatttcagggattgaatgtcaagcggcaactcatttaaggatcaacattttggtaaaacaaactcatcacgtgattggttaccaagtggggttgttagaatttataatacttctagaagagtaatgatcaatagtttaattttgtctttagtaaaataatatagtaaataaatgatattttgagtacttgttatgtgtaaattaaatatgttgttaccaacaagtgagggtgagtaattgaatagaaatatagcaatgctttgttttttaaaaaataataatgtaaatctttttcatggaattactattatgaactaatataagtacctttttttatatgatgcatctctaatcaacatcaatgaaaaccttttgtgtgcttagagaggatgtatcttagagactataacactcaagttaatattcgacaaagtagcaataggggtatgcaagaattgtgtgtacctataagagttacattagatatttataagtattaagtaacgtgttttatgaatctctcatcactttgtcacgtctgttcaaaagatcatttatagattatgttaagtgtgctccatgcatgatgttcatgtttgtgatagcggtagttgtatgatttcaggaattgaatgccgaataataattactttaagaaacaacatcttggtagaacaaactcatcatgtgatttgttgcagggtggggttgttcagatttataatacttctagaagattaatgatcaataatgtcatcttttttgtctttagtaaaataatataataaataaatgatattttgagtatttgttatgtgtagattaaatatgttattatcaacaagtcgttagcctgagtagcactgagtttaatctccttaaataagatctcaagttcgagctttgttaatgcaaaaaaaatgcagtcgaaaaaaatacccactaaagattgtcaattaaagatttgtcataaaaaaacaatagatatttcattccaataacttggttataaaaatacagttatgttgtcacatctattagatttatcaaaataaaaaatataagcatgataggataaataataaggtttttaatattaaaattaaagttttatttgactaacttatttattaaaaagagtttaataatcatatatggataatgtaaaataattttacaatgtcaactaattagaaaatattgttagtatgattttaaaaataattattataaaagttaacaagaaacataccatacacaacaatttgtgattataacagtgcaaaactgatttacattgttattgtattacataatttctctaataaaaattagggaaaaatatgtttagggttctataaaatttgaaaagtattaatttcattctcataaaaaaattgtattaatttggttcatgtaaaaataaaacatatttttattggtcctcagtgatatttccatttgatgatttactaatgtgactgacacacttaattactttattatctacttttccaaacatatttaaaagataccaaaactcgttcttatttcatctttctccttatctcatcaaaaagtactagaaaatcacatagaaagtgacaaaaaattataatttttgaaatttttagccacaaaaaattatttaattcatttcgggtgatttaactgtcatagattattttattcatttgaatcaaattacacatgtaaatctattagccacatcaaattattgtctatcaaaattactactaaggacttaaggactaacaaaaatatgttttatttttgtaggaaccaaattaatatgaaaaaatttatgaagatgaaattaatactttttaaattttataggagcagacatattttatcataaaaatgactatcaaatgttaatatatattattaaaatgaattcttattttaattaaaaacattctcaaaattatttatattactatacttagattttgtctttttaacgaattaaatttcctggtcaataatgattaaaagaagaatagcagagagggaacccttcacttttttccctcagctaacatgtaggtccatgctcttcaacctcttctcgaggtagcgagagaataaacgacaggcttacttttcaaaatgtaaatgtaaaagttacatttttttaagttttcaaaaaatgtcaaaatatttagtctgaataattatatacaatttttttttctaatcaataactatttcaccttaaactctaagcttcaagtggctactctaaacactcgaggaataacattatgtaatgatacaatactaaataacgcattatatactttaacgcgttaaatattttagtctacaatactgaatttggatcaaatttttacatgtatttcttattataatgctttcgttggttattttctagtctggttcaaagtctataatgttttttaacagcacaatcactaactttattctggactatcgaggaacaagtaagaagggaacattcttcccttttttattgctgaacaatcctctactttaactgtcaaataaaagggcacctcttcttattggtacaccaatcacttgttcacaccaaaaataaaaaaataaaaaccaatcactttgattttcatctgatgggctatcaaaattttgggcccaatgcaatgtcttgttcataacatgaattattacctggggattgctactgacaccggcacattgctattggttctgttcgcatgggtgatttttttaaaaataccctttccacgaatcattggtctcttgtataattgtacaaaacccatcatgaaaacgtgattttgttgtagtgcaagaggtgcaaacaaaatataaaacggaagcatgtttctattttttttgtacgtgaaaatctatttccatttattattttgtacacatcccttgtactacaatggaaacacatttttgttatagatcttgtatgaaactctcatactacaatgaaaatacaaaatattaaacaaaaatatattttcgtgtacaaaatctaaaatggaaacacaatttcattatgtatttgtttctgttaaaaaaaatagaattgtgattccattgtaataatccataatggaaacttacgattccattgaacttaaaacacataggggtggtgctgattatgagagaaaggggaaaaggatattttgatctttttgtgcataaggtaggagacaatagcagtgagagtgagaccaatatcaattcccttattacttcttttattttagaagcataccataaaaaattcatttaatacaattttgttactttttttcaaagtgagagtcatagaagtcttgttacaaggaggagaagagagcattgaggcttattttaaataccattaaatttgttacaatgggtttgactctcacttataaccttattggtgagtaatatgtaaatgttcattcaatcttgaaatatgctttgatcttaatgaagtcccaaaatttaactcacctggacttcaacattactaaaaaaaaaaaaaaaaagatgagaaagcaaataaaaaaaatgaaaaagtggtcaaccaaattttgtagaaattgaaacttacacacatataatttacatttcgtaacttaataattgagattatttgtattggatggaggactacctccatcatattgctttttttttttttatgtacataacttgcatttgatttggaaataaatcattcaattaattttttaaaaaacaattgagatggttaagaaagcaaatttatcatttttttacttcacatctccttcaaactttttcgacacgccgaagaaaatattattaacaatggatcacaagatgtgtccaactataaaaaaaaatacaaatagaacaaaaaatgtcaaggccaagagattgttcccgccaggcccaaaacaacacaacaccgataaagattaaatatagtgagcacatatcaaactattaatttagattataacaccacatagaaccttgattaggtaatttgcatacaaaatccgaagcaatgcttttagtttataatacatgattattttttctcttagtatatcaccaaataaggcaattgttactatttaaagttttgaacagtatgtacttaaaagttaaaatggatgaatcaaagatatgtgatccgtttgagaaaagacctgaataattatcattgtatcacattcacaacccattaagatttcatctagtcttgtccaatgcttcacaattgttaattaagactgattttcgagcatttatgggctatgcttgtggaccataacaaaagcattagttgggtgattcaatctacatgtgaaattccattcgatgaatctataagaaaaatttatattgtttataaaggctaattacacgagatcagggcaacactcgtccgtgtaagagataaaattaaagtatgcatgtatagaaaagtaagccgatatatttgtagttcatttgtagttaagaaagtctttatagatgtaacccaacctatgtaactttaatcttaatcttaagtaatttaattacattttttaatgggaattttcttaaaaaattatttaactcaaaaataatttttttctctttccttacaaagttgaacatttcatgagcaataattgtttatataaatactctttcgtcttgtagaacctcttgttatcatctttttcaggtcacgaatcatctctttactcttaaggaacttttaaggagagcgaagaatgaagacttttttgaaatattctgtctttttagatgagatttggaggacaacccgcatgaaatcgggttggatgcttgtcccctcttctcaacaaaatcctatagacaagaaagaatcgaaaacaaccctctttgcaaagtattcttcattgcattgcgtgcctttttatcttatcccaattcctagctagtggaaatcttgcctcttgtttatagggaagatctttgtgctagtatcaacttaactcaaaatcatatgtgtcatattaaaataatatttttttccttaagcaactcattaaataatttccactgttcttaaaaagttaaaaataataaaaatcattaaaaaatatcattaatatgctcatattatgatttttaatatatactgtactttttaatgtgtgatttctattaagaatcttttatttatttatttattcacaaatattatttacaccagaaaaacccaccctccaaatataagcaaggcctctatagaggttaggctggttatggtattaattaccaaagattttataattaaagagatttaaatttatcttgttaaattatttaaattatttcaacataaataaatgttgaatacttttttgtcaaaaaaatgttgaatgctttttgtatttttatataatactttctttttaataaattttatttttaaattattatcatgtatgtgcctaattaaaaaataacaatatatcttaaacttttaaaataataactatataaaaatattttttaaagttatagttgaaaacacaaaagtaagattaaacttcattaattttattttgaacactaaacaatccttagtccattctttattaatattaactttattattcgagcttgaaatttcaacacctatttggctatttccatatcacccacctatagaaatgaaatgtcacatcatacctttaggctttagccattacatctaatttaagaatatataagcgagcagtgatgaagccaacggtaacctaattaactaacatgtgcccctatctgaaaattagggagcaaaattaaaaaaatgaaattttcgtattggatgatgtgctgtatttttatttattttcaccaattatgttgttacaataattggtcatgctaaaagcaaaatcgtaataattcagctttgacatatagtcgattatatcaattatatgcttttttatatataaaaaagtgtcctaacttaaaaataatctggacattttttttaaaacaaaggtaaaatgaaaattttcataatgcatattttttcttcttttttttacctatcaaaccactttaatttttttcttttatctcatttcaactctctttcatctcagtcaaaccttcttaatttccatcctctttctaccctatttcatctcttttcattatttttcatttcttacattttcatttattttcaatccatttcttacctctttatcaaacattagcttaattttgatgcacacccttttttttactgtcacaagtcccattatcgtaaaaacaagagtaagcaggtgctactttgtctcgtgctggtggcaatttcttctttcaactttgtacatatttggattaatgtttgtaaacctatgtttggattaaacttaagtttacaaactaaatacatgtttgtttctctaaccatcgtgttgcagcacgaagtctcatacaactttaatgcaaaagtattgaggaacttgttcttgaaacttatgtttgaattttcaatttttcggaatgacaatccaaacatgtatcgagtttgtaaaaatatatcttttttttctttctcaaagttaaatttttaggtaaaatttttctctcaaacatacttttatatgagtatcctaacataaattgattttatcctcaaatatacttttaaaacactttcacccaaaatttaaaatatcctttatttaatcgattttcttcaacttagatagaagctaattttccatataacaccaacaaattagaaacttttttataagcatttaaaggagaaaatgggttctaacacaagtagttgattcttatgaataaataaaaatatttgtgagataatatatgaaattcattttaaaatcttaaataataaatcatcaaagtaaaaaagtactacttctttttttcacctgtcataccttatataccaaaatagtaattaaataaatgtaacattgtcatttcattacttttgtttataacattgacaattttattaataataatctataacaatagtaataaagataacacaaattttttattcacacaattttgttggctattttacctttaattgctttaactgcacacttttttactttatactttttattcagcctcctctctctttagactctctcatacattacctttttagataattagatatcattttcccatcttctatttttctcttcctattatttccataataataataataataatatcaatatcaaggatggaattgagaataacatagttaagctaaatatttttattattatacttaaaatattttaagggattaaattattttgtaggaaaacaataaatatttagattttctattaacattgacataaagaataatagaatatgttctggttgctcgataaaaagcatatgcgtgggactatgtgaaacaacatttttctttcgcgaaaacaaaaaatcttaagtaagtacaattaatatatttaaagaggaggaagcaagttgtcgctttggccgagtggttaaggcgtgtgcctgctaagtacatggggtttccccgcgagagttcgaatctctcaggcgacgacactctttttttttcttcttttttggattttgcaatttaaattttggaagaaatttccaaagtagggcccacaatggttagttgcgaactggggaaggtcgagtttcgtctttccctcttgccggccccggacaccacctctgacctaaatccttctattttttctttttcatttcatgaatcattcataccatgcaataattgcttttaaatagttagttgaatagcattttcctattcaatttgatatgaatattttattttaaaaaattcttataatcactaatgtgtatatattccaattatttttttacacaatattcttattctttgagacaaactactggttgcaactgcggctgtattgtagtcatcatctgaaccaatccttcccagcatctagggcacatggaaggtcacaaggcatgtataaggaggaactttttgctaagtttaattttgatatattgttgaaaataaaatttctatactattaataattaattaaataacatgttaaatataatagaaatcaatagcttagaagaatacaatagttcataaataattgacactaaaaacactttattctaagtgtatgtaacgtacgttgattaaatccatttttggttcacatttgaagagggcaaattggcatagtcaagaatctagaatggcatttggttctcttcaatggacgcctttaaccattggtcattggactcttcgtcagggtgcctctctttttcaattctgcttactaattctctcttttatgcaagtggttactggttaacgttgaagtagatggcatttatgttggatggatattatatttaggttattttccaaagtccacccttgtgaattcattgccacctcccggatgttggctgaactaattaacgtgttattacatgctgtgacttttaaaaatcaaactggttattagactgagcaagatactactattagattataatttatgagtctaataataatcaataaacaataataaattgtaaaaaaaaaaaattgtaacaaataaaaatatttttaatgacatgtaatcaaattcattaatacatgcttacttgttttataaaagaaaaatatttcatcatatgacatgattaataaataatcttattctttaaatatgttattatgagtttagttcttgggtcatgtgtatcaaaaacataagttactaaatgtcaattccttaaatagatcttaatatattggagtattagactttgattttcaattaagagataccctatttcacccaaaaatatttaattatatatttagtttttatagtagcaaaaaatttacttttagtcgaggaactagaaaaattagaaatatgatattttaaatataagaattaaaagatattttttttatagtataagaatcaaataagtaattaaataaaaaatattaactagttataactttatctttctaagaaaacatgaaagatataatttgctaacatatatattgatcaacttgtttcaatttaataagttatagctttaattttttttaaatgcaataaatgcacagtttattaaaataattattttaaaaaataaaataaaaagtgagatagcagacctcttatataatatgctaattaataatttacataaacttatgataaattaatgcaagctttaaattaatagaaaataattatattataaatccttgtaaaatgaaacaaccagtaataagcgattaaatattaacaattcttaaacgagcctttcttaacttaatacgactattagacagttatttggtcagttttttcacttagttgaattaaaaaaataaaatcagtttttcacttcctgctgatccaattttgaggtagtatgttgtttatttttttttttttgtttgatttaagatttagaataaagaaattaaaacaaagatttagaataaagaaggaaaaaaataaagataaattattaacattagtttatttaaaaactcctgttatgcattttttgttgttgttaaaactctcattttatttatcatgaaatttttgtaaaattatatttgatattgtttataagaaaaagaaaaactcctcccaaaaaaataaaataaaaactcagtagctattctttatgtaaccattacttctaaaaaaagcagtatattactattatcgtttttgtctagaatgtttttttttactagaggtaatttgttcgagccggtataatactaaatgatgttaaagtagatagcataattaaaaatgaagtcaatcgtaaaattgatcaagatttttaaacaagcgtgaatggtgatctatattgcaacattttttttttatttttgttatcgatcacggaacaagttgagttcagtcagtgtaatattaattagattttaccaaaaaaaaaatctctatatttttcaacgaaaagcatacgttagtatttttttccttaatttttttaaattaactcgattcaactttattttgatactacattaatcagacactaatttataagtcatcattgttgactttaaatggtcaactccaaaattgtagtaacaaagcgttaattcaagagtaattgagaatgaaaaatgaatataactcttagttttttatacttaattttttttactaacacctaatgagcttaacttagttgacaatcctgttcatttgctggatggcccacgtaggagagagacacacacacccttggggcaacatagagaaatttttttttattaataacatgttgagtttacgagaataatttaattttcacataatgcaaattctataaaagaataaagagttttaaattttctcgaacttcgatcgaaaagtcagaaatcttagtaattatagttataatttttttattactaacacataattttgatgcaacatacggtaataaaacgagcatttaatttttcaactattgtgaatatcgttaaacttggagactaagatcctcttcaactcaattctcttcaatctctctttggtctctctctactttatcttcatttgttcatcgtctgtctttttctcctaattattctttgtgtattactttggattttttttaattagctgcagaaattgggagatagaaggatatttaatttcttatgcttgtaacgaatatgacatcatccttaggataatttgcttgttggcttaatgactcatttgggtcacttcaataaactatttttaaaaggtttgacttgtaaaatttttgacacataatttatttaccttttatttacctttttttttttattaaaaagtgtgatgtgttaatagatttgcaagtttatatatatataatttgtgcgacttttatatatattttattatcatgttattgatatgaaatagtcaactaatttttatgataattattttttattgaaaagtctaattacctttagtcaatctcttttttctatcacatttttttttatttagaagacttgaattctaaactttgtttaaagaattttaacctaatttcacttagatcaattatatgtttgttaagagaaatattaaaaacacactctcaagtgcattgttttaacatattctctcttattggttgaaatttactaatattaaaaatgataaaagtttatgagtcttatatcaaatttaatgattctctttcttaattttgtaaattttaataaaatacaatcaattaaaaaaaatgtattcagatgggtgtatgctagaaagtgttttcctaattaatactcatatattggttaaatatatatttgatgtttcaaatatttatttatctacttgtttcataatctagctcttttataagatgttctctttgtttctatttataagattaaaatttgaaatgatgttgttttttatttataaaattcaatttaggatgtttcttgtattaattatttttagattaaaatattcttaattaaaaaaaagaaaatgtattaacaaacaattaaaagataaaaaatattaattataagtataatttaaaaaaagttataaatttaaaataaatttattattatcaactaaattaatcattttttatactattgatgaattagataatttgagaatatatatatatttacatatataaaagataattttggataacagatagtttagaatttggagatttgtttcaaataataaataacttaatttataaaaatgaaatgaagtttatatatatattactttgtttgccctctagtcttattatattctatacatcctaccagagaatggtgatattcaataccgataattcttgaacagaaagatactggttaaaagaaaaatccatacaaatatggagcacacaaaacatttattaatttatcattgtaaaccaataaaaaaaataacacaaaaaacacaccacattcctcaatcatataaaactcctatcaaatctaacaaacgacaaataaattatccaaaaaaacttattcgtaaataaaaaatctaaacaaaaataaaatagtttgatttgatacatattttaaagcatagagtggacctaaccggtaggtgttgttccagaaaagaaggaggcaaggtcccttccctataaccgcgtgaattaataagccaacgtgacctttccattccacaagttggtgcggcccgtaatcgcgtttttcactagtataaattccccttctcatttcccagaccataaccaaaacacatcgtttattcagcatatgtctcaaaggcccacgattcctcactcttcttccatagcctgcggccttcactctcatctcctggtctccagtgagatgaaccctagctccaattggtcccattagttacctctttcctgcatctcatatatcccattctttctcattcacacagcatcatgggcgtcaaaggttttgttgaaggaggcatcgcttccatcatcgcaggatgttccacacacccacttgatctcatcaaggtccgcatgcagctccagggtgaaaacaatttgcccaaaccggttcaaaatctccgacccgcactcgccttccaaaccggttcgaccctacacgtggcagctgcagttccgccgccccgcgtgggccccatctcggttggggttcgcctcgtccagcaagagggcctcgccgccttgttctccggcgtctccgccaccgtcctccgccagacgctctactccaccacccgcatgggcctctacgacgtgctcaagaccaagtggaccgactccgtcaccggcaccatgccactcggaaaaaagatcgaggccgggctcatcgccggcggcatcggcgccgccgtgggaaaccccgccgacgtggcgatggtccgaatgcaggccgacggccgcctccctccggcgcagcggcgcaactacaagtccgttgtggacgccatcacgcgaatggcgaagcaagagggcgtcactagcctgtggagaggctcatcgcttacggtgaaccgcgccatgctcgtgacggcgtcgcagctggcttcctacgaccagttcaaagaaatgattctcgagaacggcgtgatgcgcgacggcctcgggacccacgtcacggcgagcttcgcggcggggttcgtggcggcggtggcgtccaaccccatcgacgtgatcaagaccagggtgatgaacatgagggtggagcccggggaggcgccgccgtacgccggcgcgttggattgtgctctgaagacggtgcgcgcggagggtcccatggcgctttataagggttttattcctacgatctcaaggcagggaccgttcactgttgtgctgttcgtgactctggaacaggttcgcaagttgcttaaggatttctgatgatgacgaagatgtatgctactttcattttcaataagatgcgttttgtgtttgtcttgtgctctaatactagtgatgtagttctggaatggtaattttgttattctattaatcaatgagaagcacacattattctccgaattaaacttagataatcttattttttcatttgatcaaaaggctaattttatttatcatatatgactctcattagtctaataaatttttttaagcacaataaaaattaaatataaatttttttattaaataaatcgtgttcatttatgaaaatgtattagagtctttactgcaccaaatttttatactacacggcaaattgtttattctcacgtaattatagattctgagaatctttttagttttattttaagaattctgtatttgatttgaaaggtgaaaatgttgcaagagtatggtattcatgaagttttctgagatctagaaataggtggcgatattagtgacgattgtgtctttctcacgcagaacttacattagtcattagacccgacacagcacaattgtttgcggagtaattggtgttctaaaatctaaagtaaatatcccacttggatattttgggggttgggtcatgagacgcgtaaagtatctcactccttctctatgtatatcatacgcgtgaccaaagtgctaaaaaaagtgccaaggattatcctttccttcttttaaatatgcttgttttattgtctttccttcttttttaacccatgcttgtttgttgtaatgccttctcttctttttaatctgtggtcttccaactttattctctacgatcggttggtacttaatgctagaagcctagaaggtagaagcaactcatggattatgtatttagaaaggtattaatgggacaccaaattttgatagacatttagagagataaagagaaagaagtataaatgtaataaatgatacgacgtcataagacataattttttttaataaaaataattagtgttgatataatgtataatatatgagagtatttatactttattaaccgtttatttgatagtaacattaataacacactttctattacataaaaaaagctacacatttctttttaagatttgatgtttttttattacattatttctaaagctttaatagtttttaggatttattatttttttccttaaattttttcaaatctctatttttagttcctgatctaaattttgactagttaaagtttttaattttttttgttatcacttttagtttttagtttttgttatcaaataacaacggatgggataatataataaaatagttaatgatattagactacttaataaataattaaaaacatattttattagaaaaattacacatgtctactccattatattctttgtgatgtggcaagtctgtgggaagtcaaagctattactatgttatcaattaacaatattactaatctgaattaaaagtgacaactcagaaaaattaagtggtcaaaatttaaattaggaactaaaaacaaaaatttgaaaaagtttagtagcaaaaaatagtaaatctatttgtttttatataatggttaaaatttattaacaactataaattatgactaagcttcattaaataagaggtgcgattcaattttttgtgtgttttttaaataaatttaaaccaataataaaaagtatgttgaaaagaatgtgttgttagtatttttctttatttataggttaatattaattaattattcaaaataattttaaaaatattaagtgatgatatatttcataattatattgttgacattaatattatattaattttaattgggtaaaatatacttggattcatgtaaaatttgaaaagtattaattttgttctcataaattttttttatattaatttgattcatgtaaaaataaaatatattttggttggtcctcaatgataactgtgttaaactctaattcatcatggctaacaaatttacatatgtaatttgattagaaatgaattaaacaatttgtgacatttatctcccaaatgaattaaataagttttggtgcactccaaaaattataattttttgtggttttcttaacgatttttgtgcactttatgatgagatcaaggaagaagatgaaagaacaatgagttctagcgtgggatcatccatgggagttaccattgaagaataataaaaatatgttttatttttatagagaccaaattaatacaatttttttattaatacgaaattaatactttttaaatttgacttccaaacatatattttcccatttaaatttaatataattagttcatatataataattaattaacattgattatatataattaatgaatttaattaattaattatagtaattaactgacattaattatgtatataattaatattacttataaataataataataataataataataataatatcgggagttgaaaatatcagaaaaggtgtaataagatcatgaacaaaacttcctacttcaaatcttgtgtcatatgaaaacttatttctttatttttgggcttttacttcaatattggcaaaattaaaaattccaaatgatagacaaactgctcgcgagcggaaagaagttgtcttgaaggatatgagaacccctccaaaaaaactagactcggccaaaagaggacttggctagaggaaatgcaactatatagctagggtcattaattatcatcgtataaaacaaatggatctattgatagatgcaaagttaaattagtttctcacagctttagactcttaatattaatttcgagttccttgagtcgattttcaataattttcacccagtgttaagtataatttatttttgtagatgaaaagtattatttttcttcttgaaggctctcatctcttcttagacaaattaattccttccactcacaaacccttaaggcagtccgtatatcttttgatcttttttttttttgtagttttatagctagtaaaagcccgaaaggaaaggaataattgtcatatgacacaaaatttgaaataggatgttttgtacatgatcttatacactttttaatagcactagggaggtcagaattattaagtatacgtttacgatagtttgaacaggctagacaaaattagagaaattgttacctttatttgtctttgtaccctgaggtttttcatttatgaaataaaggagatcaaaaggttttacacctttattatcaagtattgatgtctcattttgttaaatttcaataatttcacaacttgttacatgcactatacgggtatatgtaatggtaatgttgatgtataaaaaaggttaacatctttctaaattaatttattatttattaaaacatgttttatttgacttgatcatttagactactcatcgtagtactttatcctttgactttgtattaggtggtttagaacctctatccttttcattgtaaatatttttgcttgctaatgctaggtaatcttttgtctcatttttcatgctgtgagtgactgagttattctcattaaaaaaatttattaattttattgttttaaattattattcgaaaggtaatgttatattagaaacttacacaccacgcggataagtggatagtgtgaatttacacatctcaaaattaatttgtttatggccatatatacatgttcgtagattatggtttgtgaatgattagttctaaatggtttatgattgatcgtgagtttgaatgccaagaagaaaaagagtcaaacctgtgactttagaaggcgcaaccaaacattatgaactgtgatgcagtcgcatataatgcatgattgcatgtaggatgtctgcacaaccagcattacagctaagacacgttgtggacgaaaacaacgatccactctgattttattagtcatcgtagctttcttgacagtcatccaggatatttatgattacacacacacacacacataatttctaataacattttttttatctaacacttaataaaatttttttgatcacattaaaaaaatattatcaaattatgaatacatgttaataatatattttatgatattttataaaaaattgtgtataatttatgttgttaaagcttaaaaatattataaaatgactttaataatatagattatacatcacatttgataaatattataaatcatattagtaatatttatttataattttataatattttttaaatgtattaagtgttagataaaaagatattactagataaacaagtttttaaatatatattttttaaaaatttagtaacatttttattattatgtgttagattaataaaaatattgctagatatcacatttatagtagtgacggcacacacgttaattgaatatgagtatagaaatcacgagttgtgcacgaataaaaagttgaaaatttattgaaatatttttaatttaaatttcatcacatgtttatcgccctttcaattcatttcgagttgatgcacaaagtatgagtacgtattgtgatgcaacatttttggattgttgaggttgtgtacgtattgcaagtggcaatttgatagctagagatataatttcctggctattaccacgattcattatcaatctccttctttttcaacctggtgaaattaaccaagcaggtaagtaaactacacaaataagtgattccatataataataatacatttcggatggaattttcgtatcagtaggtaagacaatatatccgaaaaaagttaaaagttaaaagcaataattgatcacgaatcaacactataattggagctaggactgcatacacttccaaattggctgccaggtagataaaaaaaataaaataaaagccaaagagtaaactcataatcaaaccggaatttcggtatatattcatattcatctgggaccataagtaatctggtccttataaggtgggttttgaatcagagttactggttactgaaaatcccactcaacaccaaaatattagaaagggagtgtgtgggaattgcaagatattccactttggccactttgggttactcaaataagagtgtttcaaaagttacacttgactatgcattttgcattgtgcacttttctacgggggcacaaagaagcaccatacccataatcaataatggaccctataatcagtggcggttctaccatgcggccagcaggggcatatgcccaggctcagttaggcattttttttggttacaagcccaatatttttttattagtattaaaaaacaaataaaatttaaaaaaaaagaaagaggaaaaaggaaaaaggaaacgtaaagtttccgtctctccgaatctagcagtgggcagttcctccaactccctccgtcgccgccgcctccctcctcctctcctctgtgtcttctcttccctccatcgccgactccttctatttcctcctctccgcgccgtcatcgccgtcttctcttccataatcccatagcagccgcaggtaaggtaagttaggaaaaataaaagtgattaagatggaaagtgtttttgtttgttgtgatacttccgcgttctttaatttttcttccatttttcaagtgtgaacagtgaactcatagagtcatagtggacactttttctttttcttccccactaagagcacgtttattgaagaagaaaaagtcatattttattcccttttttttttgcttttctaatatggaaaaaagcttagaggaaaagacttttgattgcttaagttaataatttctttttggtcttttgtgttgcactacatacatggttgcaaaagagttttctaatatatcaattgcaaacactaaaattttctttgctacaattttgtaactattttatctttatttcagatatgaggagatttttggttgatagagaaaatattgagaatgtgaatgttgtgcaaccggaagctgaattagaaccaccacttaataatgtggttaatgagtttaatccaaatgagattgtgcgtgatccaggtcgtaggaaacaaattaatgagtatgctccggatattcaagaccaagtgaggagggcatatatattgaagggtccaatgcaaccagatttgtcaaactttcctcgtactcaatttggaagtgttaaaagagcatttagtaaatcatggtataagaattatacatggttagaatacagtgagataaaggatgcagcttattgtttttattgttttctatttaagcaacccgggagggccgagcactttggttttgaagtcttcactaaaagcggatatagagattggaagcatgcatctcaaggcttgaaaggtcatgttggtagtcataatagtttgcacaactcatgtgtcaagcactacaatgattataataatcaaagacaaagtgtgacaagtaagtttgctaaagcaaccaaggaatcagaagaattgtataagattcgtttgacttgttctttagattgttcaagatatctcatagcacaaggcatggctttccgtggccatgatgaatcctctacttcgctaaataagggcaattttagagagatggtagattgggtaaaatctcagaatgaacaagtgagggatgcttttgaccgtggtggaaaaaattgcaaaatgacttgcggtgacattcaaaaggagcttgcaacgtgttgtgcacatgaagttaccaaggtgattatggaagagcttggtgatagacaattctccgtgcttattgacgagtcacgtgatatatccgtcaaagagcaaatggcggtgatgttgaggttagtagttgtattttccaatttccaattttcattacctattactctctatgccgccaagtaaactggttgaatttgttttaggtttttgaatgacaaagggaatgttgtggaacgatttattgctctacatcatgtcacagatacttcatctaagtcattaaaggatgctctttatggtattcttgataagtacacattatctatttcaaggatacgagggcaaggatatgatggagcttcaaatatgagaggtgaatttaatggtttgcaaagaaaaattctagatgaaaatccttatgctttctatgtccattgttatgctcaccgtttgcaattggttgttgtgtctgttactagtagttgctcatctattcatgatttctttgagtacatcaccttgattgtgaatacaacaagtgcatcttgtaagaggagggatgctttgacagaggcacaacacaaagatattttaaataaacttgagagtggtgagatatctagaggaaggggcttacaccaatcatctagtctcactagacccggggatactagatggggttcacatcatactacattgcttcgtttggatcaaatgtggtcctccgtgttaaaggtgcttagtatggttgatgaagatggacgtggaccatctcaagcagcaggtttgatagaaaaaatggagagctttaaatttgcttttattttgaggttaatgttaaagttgtttggtatcacaaacgagctttcaaatgtattgcaaagaaaagatcttaatattgtgaatgccatggaattagttgatgttgtcaaagctcggttgggcacaatgagagagagtggctggaataatttttttgccgatgtccaaggattttgtgtagctaaaagtattccggtaccaaatatggatgacgaaataccggttcgggatcgttcaagagcagaagggaggactatcactaatcttcatcattaccgtgcaaagattttttatgttgctattgataaaatatgtgtggagatggatcaccgctttagtgaaggaagtaacattatacttgattgcttctcatgtcttgaccccaagaactctttctccaagtttgatgttgataagcttgctcgtcttgctgatatttatcatgcagacttttctgatgatgaccgaggaacaattagggatcaacttgaaacttatgtgcttcaagtgagaagaaatgcttctttttccacttgtgaagatgttcaaagtttggctatgaagatggttcaaactgagaaacatttggtatttccattggtttataaacttattgagctagctttgatattgccggtgtcgacatcatccgtttgtgcaataagatcaacgatgtgtggttcaatgacttgatggtatgttacaccgagcgggagatattcaagtcgcttgatgatattgatattattcgaacatttaccgcaaagaagtctcgaaaaggacacttgcctcgtaattttatttaacccgctattgtaagattatgtttatctcttttattttaaactatatttttgttgacaaaatgacgagtctcttttattttgattgattactatttacatattatatacaatgtgaatttgctatctttaaatttttgcccaggctttataatttttctggctccgccactgcctataatatatatagtaattagctaggtgtaacatctcctaaaagagattacaaagttgaaagtcctattattcccacatgccatgttgttttctcatctgtcaatctgtagatatttttttcccctccaaaagctatcatccttaatttagagataattgtgttcactaatgacatgtagtgatttgaacttttgttaaccacattgtgggattatcccattctgctagaaccaacatggttgatgtctgcatgtagacagaaatacggaggcttcgcgagatgatctacgacataggcatagttgtcatcatcaggaaggcaataaatcgatgatgtcaaacgagtttcaaattttcaattattgggtgcaacatatccaaaatctttatgatggaattgggaagaattcctgaacgcaaaagcgattttattctgacactcacaaaaaccgtatactatactacacagagaaaaaggatcatgaaataatttcaaatttaacaaaatacgtattttcaatttttcacattgtttggaaattttctgcactacttcgggtttcaagagtgtcattcaacagatataaaaaacatcggcttatctgtcaaaagtctttaaagttgcccttcattacctgcatcaatccaattttcatttgcatacaaattcaaaccgaaaaaaacaaattagaaaacttggaaaacaaggtagttatcatacatttttgaataaattaaaagtacgatggccaatgaaaaaatatagttttttcatattcaagtatcttggttgtacatgccactactagaatttatagatttaacatcgcacggttaacatcgattttaacatacgagatcatttaatttatttccatcaagctttattaacatacgatatcatttaaatctgtcagagctgctttaaattgacattttcaaagaatggatggtatcaaggtggaattctgtgaaactgaagaaaaatgtgtcagaaatttggtaattacttatcagcttgctaggactaacggcgctgaaacatttcagagtcaattgggaaaagacgtcttgtagaataattagtattgatcatgcatatggcgagtgatcgaaaatgatgagggagtggaaactgagtagaatgctgatatttcagtattcgcaagatgcttcataaagaaagactagaaaaggtaagatacaattaatttcatcttcttactttgaacaagtgaaaacacaatactgaacaaatatcctctccatacttccatatctaagccaaaggtgaacaaaaagacaaacacattcctcttattttcaacctacctacattttcactcttgttttaaccttaattgagtgtttttttatgagggaaaaacttgtcatggatggcatccagtcagaaaaattggttcatttctaccaatttatactcttattttcaactctatgccataagcaaaacaaaaaaggagtttaatttataatatttgaaactatctgcataattttaaatatgacttagaagtcagaatttgatagattgtgtaaaatattataacagaggcaaatattccagctgttagttcatatacatccttcatgcatgatgagtcgtttatttaggacttatttagtaatttataattctcaaagagtcaaagacaagcaatcggagaacttgattctcaaattctcaatcttgtccaacacacgctcctagcctaagatttataaatcatttggaattctcaatcaacaaatctaaaatacttgtatcatgcatcagtgaatatttgtacacaactcacgaatatttttaatgtcagaaactactttcatatatgagcaaatacatggaaggtctataacacggcaaggaaatcaatatagggaacaatacggatggatttttcagtgaaattgaccagttctgttcagttttcataacaatacttatttttcatttcctatcattccgtacaaataattcttaagtagaaagttaaatcacattcacatgttaaaggacttgaatcacctccattcagcctaacgcaaatcgtaacacattttagtatacctttacctatttgaattaattagtttatgttaagaacataattttttacataatatggagcattttaaaaaaattatagtttgagactttgagtaagtgttgttcaatggcatccaggggaatgtaagtttatcccatagtttagctactagagctagttggcgcaaaacttgattttgcgtctaggggtgacaaatagatgaattagatcaattctaacgtgtgtcctaatgaatgggatcaatacaatctattttgattcattaccaattatttaatgaatttgattcatttgataaaaaatttattcaattcatctattaacatttttttataaatgaatatccatccaatccaccaaaaaaataatttaaaacttaattatttttagtttagaaataatatattttaaaaaattcacaatattttttaaaataataatagtccaaacaaaaggcgactgatgttgttttcaaatgatcttaatcgagattaatttttgattgacatcggcaaagattatttttcaaccatcgtcgactgatgatgtttttttgttaacattgactaagttttttcggttgacataagtttagactattttttagctgatgttgaccaaaaatatttttttggttgaggtcgattaggttttcttgttaatgtccgctaatgatgtttcttgattgacattagctaggttttttcggtggaaattgattgagactattttttgattgaagttgagtaggttttttggtcgtcattagctgaagctattttttggatgacattgaccataattatttttttgctgacgatgactcgggtagttttttttgttggggtcgattagaacttttttggtcgacgtcagctaagattattttttattttttgacacgtcagctgagattttttgatcgattgttagctagggaaatgttttgactaatgtcgtctaagagtgaaaaattaatccatttattctgtatccatccacaataaatccatcaaaaacattgtggatcaaattgcatctaaactacgctgatggtataattaagctatggaatcatgctttgcaatctgatatgtcaagagacgagatactgcaagctacagaaaatcagtcttttttaagactgaaataacggttgtttggacaaacattctaagaattcatttatttattttgttttattatctaatggtgaaaactgattactaacattactaaaattgatacaccactcacagtcacaggttgcatccttcctgtttatttgatgcattatacgtacagagattttcttaacatgatgcattgatgccaatatgtaaagtcaatggcaacgaagaacaacctgcaattcgaagctgaaagactgacaatacttagcatttaaatttgaagccgagagatatgttcaacgagtggcaagctcgctaatggtgggctgagaattatgacagagaatcatggagctttataacgtccagatagaggatgaggtattctaaacttttacacctatatgatgttaacactccatttcatggaccttgttaatttgtatggaaagaaaacggtaataacacttacctccatgtttatcactatcttgagaagactttgccacaaatcaaagcttattttctgtcaacaaacgataacgggttcaagatttttcaatgcacattatttcctttgaacaggaaagagattcttcttactcaagattgacatctggataggaaagcaatttttgtgactaaaatttatcccttaacacattatccctcaacatcccattcatcatgttatcaattttagtaaaaaattattcttgatgtatatatggatgtcatcattgaactgacttaattgaaaattcttaatagttaatattaccttgacatgtcaataggaagttctcaagaaaaaatataataattttctttgacatattatcatagtaattaaaaagttatttgttatattttaattttggacacctaatgccttaggacattagttgaatgaatattggatatgattaaatatttgtaaaattaattattaattaagaatgaatccatcaattttaggtaatgaggttgagtactatgatagaattaagatctagaccacaatgacaccagaatgaaagaagaaaagactttcttaagccatttattaattaaatatgctagcttactagagtttgataataatattatactttagagttaaccttgagcgattttctatcaaatatatatttttttctagttctggataattactattatttttaataagtattattagaaataaggataccatgaattttatttatcaaaatggtattttttttgtcattttttattatattggactgaggttgaaaaaacattttcgatttgtccatgaaagcgtccgttcaggaaataatcatatattttagttaaatattttattttagtttcatcattagacaatcaaattcggttttctaatatatccagagaaatcaattccttatccataatttttgtcctacttacaaattcattgctcagtttgttttttttattattattattaccatagctccaataattagacaattcattataagaaatttgatcttttgtgaagagataaaattaggtttccatcattttatgaaaagttgatagtgttgctagaggtgttgttagatgcctatcttgattatgattaatttactactgttttaatattgaacctataggtcacatagacgagtgttccaatcttcgtaaaagaaaataatttacttgataattaaattagaggatttaatttaatcaaataaatattttagtggaatattattatattttttgttagcaccaagaatataattgatataagaaagggagtattattttataaatgtgaaagttatccataaaatatgaataatatatcatattactacgtattaaatgtgattaatgatcatgtgattatctgtgaattatctttatatcatgaattcttaagataaaatatatgagataatatttatttttataaacataaagatataaaattattttaaatctttcattttttctttgaagaaggcccaaatccatactatgtctctaacattgtaaatagagaaacatttacccccattcattcaaagtaaaccagacacaacctaaaaaaattcaaatatacttctagacaaaatagaaagataatttgctttatacttttagacaaaatagaaagataatttgttgtttagagtttcatttcattaaagagttgacatgagaaatcgatatttgtgtggatgcagagtctttagactattgaagaattattttttttgcttcaaatacataaatctatatttctctctatttattattattgtatattttgaatgcaaaataaatcctaatttttctggtgtaagctttaagaacacttttctggtggtggccaaaacttccatgcagggtcatatgtagaagcatcaaggacaaccacctcttctagagatgagccatcaatgagaaatgccagtgacatggagacagagtggacagagcatgacgaacctggagtgtaccttacaaataggcaattagctgatggaacaagggatcttctccgtgtcagaatcaggtaatataatatcatgctagtcaaaagcacgttccttgttttgtagtgattcctccacaaaaagatgtggcatgttcctccacaaaaatatgatcctgggaacatgtacttaatttggtgaaatgatgaaatggtcctagattagattggatgtattatgtcgttgacatgttgccaaatctcattaaaattaaaattttcacctagggagtaagaataactttatttttagaagattattaggttttgatttgacagtttatcaactctgtctgcaaccggaagggatttggggagggaggggcaaagaaatggtggaaagagaaccgagaaagaatacaagttcaatatctttgaagtcttgtggccttgaggagaagtggatgtcccaagattgttgttagaaactattttataaatgaatgagcaaatacttggaaggtctataacatggcaaggaaatcaatataggagagttctgttcagtttccatcacaattcttaattttcatttcctatgatttcgtacaaatagttcttaagtagaaacttagatcacatgttaaaggacttgaatcacctccattcagcctaacacaaactctaagtttgcaacacattttagtatataatttgaatcggtttaagttaggaacataattttttacattatacgaggcgtttaaaaaaattaatagttagagtagcgtgttgttcagtaatacaatgacatgtacggaaatataagtttatccaatggctttgctactagaggtaattcatcgtgtacagcattgttagcacacttttttttgtatctttatgctctttgttgaaagatgcagccagggacgtgggaggagtttgttgttgaaagcacaagttggttttgtggtcttaacgcttacatctctttggtcgtatctggaagaccgtagtgaagaagggaaagtggaaaacagctatgggaaaatgacgaacgtgacttccactgatggcagtgagcttgtcgccacaactccaacttggattcaaagttggtgtcactaactttttcttagtgacattgatgaagatgaactttaagttagatccattcgttccttttcttgatatgcaatcacgtggtccaacaaaacgggcttgcggattactctttcatcaagatgcagattctgtagatttagtagatttggaagcaaatactcaagtcttcgcaggtgatgctgttgtgaaagagaaaatgtagatttagaagcaaattctcatgtctttgcacctggtgatactggtaatgaaagagagaatgtagatttagaagctaattctggtgtcttagaaggtgacactaatgatgaaagagaaagtttaatcaagaaggaatcagggaaatccaaaagagcagcagatagtatcagatcactcacaagtcaggttggtagttccaattttttccagtatcagggcaagaggaccttgcggcctcacgtgtgtggccttcaaagttcgcttagactcaccaaacatgagatattgcttgctgtaacattagactcaccacttccgagattttgtctgctttattgttcatgtgggcctataaaagatgtttcaatgggttaagagaggagagtgattataaacaattcttagccttgactctttagcagttgtagcctatgaagcatcaacaccgacacggacatcggacacagacacgtggacacctgtaatattcaaaatatagaacgtagtacgggtgtcgtgtcggtgtcggacaccgacacgacaaggagctgaagtgtccgtgcttcataggttgtagccaaggatggtttataaacaccttcctccattaactcacatgagcaccaaaatgagtaatacttcagatgtggtaattaaggctgcagatttggaatactaaaaagactttgcaacaaattaaagtgtttttttcctcaacaaatgatatccggttcaagattttcaatgtacataattgcctttgaacagaaaagagattcttctatgctcaagactaacgtctgcacaagaaagcacaatttttatcactaatacattcatttttttttgtagtggtatcttctgaagctatggatcacggtggtggccaaatcttccatgcagggccatctgtagaagcatcaaggataaccacctcttctagatatgagccttctatgagcaatgccagtttcatggagacagagtggacagagctagatgaacctggagtgcaccttgcaatcaggcaattagctgatggaacaagggagcttcgccgtatcagattcaagtaatatagtatcatgctagtcaaaagcatgctccatgttttgtagagattcctccacaaaaagatgttacatgcatgttccttcacaaaaatatgatcctacgaacatgtacttgatttggtgaaatgatgaaatgctcctagattgcatgttaccaaatttcattaaaattaaaattttcatctagtgagtaagaataaatttatttttagaaaattagcaggttttaatttgacagtttattgactctgtctgcagccgggagagatttgggaagagagatgcaaatatatggtgggagaggaatgctaaaacactctctcactcttttaacactgtctccgtgctgaaatttttaaaaattatcaatttttgataaatttcaaatttaaattaagagagaaaataattaaatgataaatgagattcatcaaaattgataatttttaataaattgcagtcaaacataaagagactattaaaaagagtgtcagatactaatatttatgatgatgggaagagaatcaagaaagaatacaacttcaatatctttgaaatcttgtggctttgaggagaagtggttgcagcaagactgtagtgttgttgagtccagtttacggagtggatttgtatagagaagactagccttcccaccaataccattagtgatggccttatggcattaataaaattgttgacactctcaaccgaatttgctattgtgctgactcattaagcccttgaggaggtctaatcttgcatattatatatagatgcatttattcactcctttctctcttgatcttttttatcttctccggggatgcttttgtgtggtaacagttgccgttaatcaatcaatcattttgtttattttggttacttaagaacaatttctattttgactttgcgtcaattaattatcaaacgcaagtgaaaacaccattagttaaggcttatgcggggtgctaattaagcattattcttggctggttagattaattgaagtggatacaaaaatatgacaaattataaatttctctttaatgcaagcatgaaaatgcaatttttacatgaacgcgtatgcttgagctgtaagcaatactcttgggtcacaacttggataagaacaatgtcccacaactacaagttcttctcgtttttggtcaagaacttgagatcttgacattttccagccattttccttttccatgtccagtaatcacactgttcattcgaaccccacacctgcttgagatgcctacacgatatgcagatggcaagaatactgaatctggccaccaaattaaaatgctcatagttccgaacatgatgaccaattatttgcacatacggtacatatttaatatgaaactgggatttttttctctctttcaaatatgttatttaaagtaggataaaaatagagcatattgaataaagaatggataaaagataaataggtatataccaaaattaatggtcctttatcaatagtcggctaaatatttaatgtacttttttttttaacttggcgttgaatgcgtattaactacatcagtaatattagcaacaaaaaccgaaattctaatcagatcaaccgtccacatttatgaaggtttagatatttttttagtttttataatttagttttttttcttatattttttaatttttgtaaatgatgtttaattattattttttatttttataacgctttaaatagtattttattattatctaaacagattaaaaaataaacataattcagaaaactaaagctaaaaataattttgtaaggatgaaaaataaacattaaattataagagttaaaaatatttaaatcatttataaatcattttgaattcacaatcaacaaatctaaaatactactatcatttatcactaagtatttgtacacaacacaaaaatatttttaaagtgagaaactactttgacatacgagcaaatacatggaagtctataacggcaaggatggataatggatttttcagtgaaattgaccagttctgttcagtttacatgacaatacttatttttcatttcctattcattccgtacaaataattcttaagtagaaactattatcacattcacatgctaaactgttaaaggacttgaatcacctccattcagcctaacacaaatctaacacattttagtatacctatacttatttgaattaatttatttattttaagaacataatttttttacataataagcatttttgaaaaaattacagtttgtgactttgagtagcgtattgttcaatgacatgtaggggaacgttagtttatcccatagtttagctgctgtagaggtaggtgtcgcagaacttgtttttgtgtcgaggtgtgactaatggatgaattgaattaatctttaatttgtatcttaatggattagattaaaaaatttattatttcattttgttcaattaaaaattatttcataaatatcatacaattcatttgataatatactatatttttttatggatggatatctttcacaaagatatattttttaaaacctatttttttaaataatatatttaactttttttatagtttctaaaataataatagtagcccaaacaaaaggtgactaacgttatttttgattgacttcgattgagactaatttttagttaatattggttgaaataattttttgtttgacatcaatcgacgatatttttggccaacattaattaagtttttttaggctaatttctgcatgagttattttttgatcgatgttggccaaaagtattttgtttttattgagatcactagagttttttttttgttaatgttagtcgatgatgttctttgattaacattagctagggatttttcaatcgatgtcaaccaaaactttttttggtcaacattgactaggattttttagtaggcattgaccaatttttttttgggtcaaagtcaattgagactgtttttggccgacattggccataactatttttttttattggtgttaactagttttttttttccaatattggttgaaacaatttttttgctagtgtcaactagaattttttttgatcgatttttattgaggttgttttttggccgatgtcgaccaatgaaaattgatagacatcagttgtgataccttctaccccgatatacatatttatataataaaatacatgaaaaaaaaaattatataaaacgattttattcaataaacataaaggagttcatgtaggtaaaaaattcatattcgagttaatcaccaagttaaagacttatcaattaagggtatg

SEQ ID NO: 207 - DNA, 954793 bp, Glycine max
  misc_feature 43820..44916: note = n is a, c, g, or t
  misc_feature 46717..47368: note = n is a, c, g, or t
  misc_feature 103322..103421: note = n is a, c, g, or t
  misc_feature 139978..140077: note = n is a, c, g, or t
  misc_feature 170238..170426: note = n is a, c, g, or t
  misc_feature 174903..184902: note = n is a, c, g, or t
  misc_feature 209310..209409: note = n is a, c, g, or t
  misc_feature 214810..214909: note = n is a, c, g, or t
  misc_feature 325395..335394: note = n is a, c, g, or t
  misc_feature 406264..406363: note = n is a, c, g, or t
  misc_feature 408179..408278: note = n is a, c, g, or t
  misc_feature 614669..617513: note = n is a, c, g, or t
  misc_feature 803970..813969: note = n is a, c, g, or t
  misc_feature 888750..888849: note = n is a, c, g, or t
  misc_feature 948095..948194: note = n is a, c, g, or t
  source 1..954793: mol_type = genomic DNA
chraaaaattatgcctccaaaatggtaaaacttgacagagcatcagcataatgctctgatacaaattaaatcaaataatgacctatgattgtgaatgtcttaaaatttcatcatttggtgtctcattttcttcatcatctccatcagatatcgatgagtcatcgtcagaatcctgataaatagaggaacaatcattttttagttgtggttgcatgtcacccataatcgatgaatcagccagtacaaaaaaataatgcatggaaaattttaaaacctcatgatggtgacgcttaatattgtcatgaatagctccgatcgccttaataattatgtacatgggtataataattccactggcccttagtaaaaagacctacaaaaaataaagaaaaatttaatttaatgattcacaaagtagatagtatatccttttagtagaaaactgggaatcaaatacttaccgtaagaattgtaaatggataatcttccattccatctgtaaggagtgcaaaaagatgtcttacaagcaagatgagtgtaaactgcaataacaaatggcaactagttagttattttaagtttggtcatgttaatagtatcaatctctgtaaatcatctacaaccctccggaagaaacatgactcaaaaatataataaactctacattcttaattttaattcaagtaattttatattgtcttctatcttttttcttatcaaataaaaaaaagtaacaaatgttttctaaatttttaaaattttaaatatatctatttttatctaatagtattttttataaagtaataagagagttaattagaagacattataaaaaaaaaaaaaatagaggagcactactaaatactaatactcccaacaaggctcaacaaatcctttgtttccttgaagagaaaataatcaaatattgtaaaggtcaattcaaatgtagctctcaacaaagccgcgtgttggtagtgggcctagtggcatccccattaacaacagaatcagattgagtccagacagtctttacatacattcactcatttggagacacaatcaaatttaaaacatactttcaaaatctgaatcgtccaattttgatgcaacggttatacattaaatgcatctttagggcattaattaaaaaactatcgtaaaagaaaaaaaaatatttattataataatcataagagcttaaaaaaattataaacaacataactttatacattttaaataaattttctccatctaatttcttaaccaataacttaacaacaccaagttcaacaaaaatagacatgtaatgtaagtaccgcaatgccagttgcctcgaacactgttcaccggcatttaaaaaatctgaatcaagttaagatttacccatcacccactacggaacaagcaatctaaaaaagaaaaatagtatgacttcccaacggcactctcttaataaattccaaagagagagagagagagagaaatgtacttaaaacacttattacattataagtaaatttttttaaaaatcatttaatatttttatttataaatctttaacaagtagtatgaataaggtcaataacattagttttttttttctttttttggtgaactcaataacattagtttatgtataaaataaaaggagtaaatatagataatgcttacagctaaagccagggatcgacaacaagccgcggtcctatctgcagcatacgtgcattcagagtaattgtttccttcaacgatacccactattcttgtgtttaacggttcttgttcattccttgaaatttgcaggctatccctgttatgtaatacaccaacaacaaaaatcagcttttggattagtatttctcaatttttctagaaataatcaagaaaaaaacgtttctgcacctaaaagatttaaaatttgggcttggggagaaaaactttgccaacttgcttagtcaaggtgccacattttcgaaatgtgattcgattaaagctaaacaattagttgcaaggcacataatttcacttggattgaatcgcacggggaaaagttgagttactttgagacacgttgtaaccaagaaaattaaaattgtgtttaatacttaaatttaacataagcacgtgagatttattcaactatacgaaaaaataagcatataatgcgggaatacctaatggtcattgctgcatcagttatttgcgatttctttggggctgctgtatatccaggttcatattgctgcaaaaacaaggaacaaaaaataaaagagaacgctttgagctcatcaaattaaaaataaataaattcaaaggcccaaaaacgaaaagaaaaagggatcgcagagacacagacaactcctttcttatttttaagaaatgaggattaatagcatcaagaaatcataatcgatagaaacttatcaagaaaacaaaatgaagaaactttaaccaaagcttagtacctggagacatatttcacaagttgtatttcctttctcatcgcaccatgtctgaatgcaatctctgtgagcaaactgaagaataaaactaagatgatcatgacaagattctctaaagtaaagtaaacataaaagttgttaagagattgtggatttatttaccttaactgtcccagaacaagcacaaggagcttccaaggttttggagctctcaaattcttcttcatgacatattctacagcgagaaatcccagaaagtgatctcaaatcatcaaccagcaatacaacttcttccatgtctcttgcaaccacggagagctccatgtctcttaaaacttcttcagccttggttttcaaattccgtttagtactctgttttcctatctctccagaatctcaactttatatataaaataaaaaacaccgaatttccaatactgcccctgtatgattgttaaactaaataaatctgtcaatattatttgatatgaccttttctttcttatattttcatctcttttatatatatatggaagaactgttcgtgttgtattcagtggaacaagatcataaacataataaacgaaggctagctttgactccaaaaattggacaaagagaacttgcaaagttgcaatgcagggtcaaacaaaacctccttttggcttcctcccaaggcatgaagcatttatttaagatagtcaaaattaagagagaagaccatatgagaacattaatgtgttctagaattccttgcttatataaggagaacaagtcatggtctatgccaaatgggacaaagcagatacaacgggaaagaagaaaagtgtaacttatagtcgtgtctgctgacttcaaccaaatatttttacatttttttaacatattatttaactaatacagaaaaattattattctcttgtttgtttattattttttcttaatataaactaaaaagacaattataattggacgaaaggaataataataatccattgattcatactaacttcgtactcaagctttttggtaacatatagcagctataaaggaaaaaaaatgcatttaatctatccttttggtaagaaaaacatttgcattcaaaatttcggtcaagtacaggtttttttttatccattatttttctattcactatctcctaccattttaaggatatttttcctttgagattattttttcagtttgtctttctacggttaaataatcaattcttaaattttcttgttgactatacatttggattttaagtgttcatcaactacctattcggttattccctattcataaatgttattcattttataaatagtatctcatttttctagttgtgaaattcaaagtcaagaaatttatcaatagatttttttattgataaatgttaattgttagtattgttagattttaaagtaaagaaatttatcaatacattaatttgttttagatgaagtggaataaatgctataaaaaaataaatgaataaagataaatattcactttaaacaaaaaatagttcgatgttatgctaagcacgcagataatggtacatcctctagcaatatatttctattgatcttcttaataccttataaaataactattaaataaataaatttgatatgataaaaacataaaagacatataataatttcttcacttaataaaagaattaatagaaatatgttataagatgacgtaaaatacattcttgataaattataaatctaatcaatgtcaaatttagtgctaaacaagcatttgactcttttaaaatgaacaactcggtgtaatttattatgtgtatatacataacaaattatggatatgttagtaatgttatcattgattttacgatcaacgattgagcgagattactttttttattaatatttactttagaggagtcaaattcactagttatttatttatcaaaacaattactatttatttgaatttgactcatctaaaatgagcaagaataaaataagtaattcaatctctaataagaaattaatatttaaagacatctataatttgttgcacacattcatatatatatatatatatatatatatatatatatatatatatatatatatatatatatatattctcatcaataactgaaattatttactacgtcttatataatgtaaccaaaactaacattgtaaattattaaattttaaataaaaatttattggaaaataattcataacattgtatatcttaatatgaattgtacaatatccacgacctcacactcgtgtcttaagcacgtacaacatattgcgctacaatttaacattggttcctaaataggaacctacactttctctttaacactggttcctaaataggaaacctacattttctctttaacactgcgcatttacacttttctcaagataacattacaattttttttatattacacaacctagatgtacatttttattatgtagtcatcatttcatcataaaaataatatgtaaataaaattaaataaggaataaatataaacattttaacaattaataactgaacaagacaaaaacaacacatacaatgttcatattataaataaatcttttggttgaacttgttacacgaatttcaataagaaggggggaccttgttacattgatgattaattggttgcaataggctatgagtgcattttgggagggtaaaaagtaaaaaagaagaaaaaaaagctacttttgtaaaaacatgcaataaaatacgttgttgtgtgtccctcgaaattggcctttcaagatttaaatctgggacctccgattcttcaacaacggtaacaaacaatcaaagacaaactgaaatttgaaatcatgggccccgctattccattacattaatccaaacgcgttcaccgaaatgcatcattaaccgtgattcggcgggccctcctttccatgtctcatgtcttattcctttctttctttatttttaccagcagaaatttttattgttttattatattttattatataaaaatgatatttttttattatatttaaattgatgtgaatattaattttagtttaatatgctttataataaatatttttttattttatatatttatttatttttctcttcattacatatcttactttaaaatatataaaaatatttaaaattaaagtatatatacctaagaacaaagataattaaagattaaaataaaaaaaattaacatgtgatataataatgttatcatttcaatattttacaaatatcaaatagaatagaatgatattcaaatatttactacagatgatttaattaaatatgtatagatagagatgtatttacaaacacaatatattaatttatcatgttatcataacaaacaaagagacataaaaaataaaatcatgtatacattataaaacatattaacctaaaattaacatcaatcttggagtatttatatataacttataatccttttcagcaatggattgtataccaaattgtcaaataattgtgtatattttacaactttatttctataatatttaagctttatatatatgtcccatgaggaaattctactactttgaattcgtgatgaaggaacatatggtagtgcttgtgtcagtcataataagcttttgtttatgttttatatttataactagaaaaaaaaattgaaactcatattctcaaacttcaaggtataaactaagaaaaatccacatgatagaactgttgttgcataacactatatagatctatgaggtgttggtaagtaaatggtgggaggtcaactatcgtgctaggtggagggggaacaaagacatgggaagaattcctaaataggaggtgcactcaatggaaatatgtttcttgcaaagactttaaatattgtgtctttcttttttctttgaaaaaaaaggttactattagataaacacttttttcttttcttttgggatttatactgtatcttgtgtgttgatagattagaaggaatagtaatttggttacttgatatttattaagtatgttgtgtgatagtaacttggttacttgaaattgtctgacctaggaataccattagtaggccggttaatgaataaaatttaaggatggagagcagattcgcttcaaacctaaacatatgcataaagataaaaaaattaataataaaagagtacaaaaaaatcattatctttccgttaaccattcaactcttatcttttttgagtaagtaatgaccatgatatgcatgttctttgcctcaggtgaaggattctctaggggacattcaactcttatctttttttcagttgcatcgatcatgatcctctcataaatgcacactttagtctaagtcacaatgagcaaaaaattcattttttaaaagaatagaaaaaagagttgcacatacctctcaatggattttcaaacttcacaacttcattcaccccatattttatatgttgcaatcgtgtctcccataactgataactaactctacgtgtgtgccactaaaaataattataatcaatcaattaaaattttagcatattttcaccaacaaatcgagaaagaataagaccctcaaatttcactttagtttgaaatttgatcagttttacatgcattcgacaaaatagaagaatcaaatgtaactaaattaggacaagagaaagatagggttcgatcggagtcgacgaatgaaagaaaagaaagattctattttgaaggttaaaacacattccagtattttaaggttttttatcttctttagttttattagattccttcaaggttctccattctaaagtctaacatacaacatattatctcaacaatggtagtttttgtcaatataaaaatgaaatatagaaggctaacatttaattcttccccttttcatttgtatgaaaagaaaaaatgaaggattagagacaaataagtattgtacaatgcacatacctttttcttcttgaaaaccttcaaatatctttagatgaatccacccgacattaaacaattgttattagacaataaggagaattcaaaaaaaaaaaagagcaaaagagaattagttattacactaaaacatgcaatccttcctttatagcaacctggaattaaaaaagaaaaatcaaatttctgaaattaaaaaataaaattatcccaaaatctcacgaacctctttggattggatgattcatcaactactcttaaatctcctaaacctgaaaccacagaatatcaactgaatatgaaaaaaaatcatgaaatgggaatgaattgaatttgaaaaaattaacaaagaaaaagacaaaaggttaaaagcaaaaataaaaccatcacttattgttacgactcaggaaaaaaagaaaccaagaagtttacggttagagaaagacaaaataaagtagtagttagaaggagatttcacataagtatgacagaggtagcagttaaattttatgggagagataggagttacgttaggaatggtgagataaggaaaaccaaataattttttaaatgtaatgacataataatggctactaaaagatgaaagagtgtacgacgactaagtatcacaagattagaaatgtgtagttattcagttttcaagtatcatttcaacaaattgaaagttataaatttagacatttgagagtaaagatatccaaaaaaagtaaagaccaagcaaaaaatattctctatctatagttatagataaataaatgatactataataaacaaagataatccatatttataatttatgtgtaataaaaaaaagttgtacaattcaaagtgagatcacaggggatgtgataaagagaagtagaaaggaaaaataatgttataaaaaacattatataaataatataactcataaattaatgtattatgtatacatttgaaaaatgaaaaatcaattttgtcaaatgaaaaattaattttgtcaacaattatccatccgctctttgataggaaaataattgtactgtataagatgcaattacttatgtttagttttttattttttaaggaaaaactgcattgcaacgtaatttattaatatcattttgtttattataaaaataaatgaaaggcatacgtgtgtatatagagttataaataattgaaggttttatgattttatctcttcacttatataggtacaaatattcctatcatctatcgatttgctcacccaataaacttgatttgtttgctatgtaaaagaatacatgttcttaaattgaagaatatgtaaaagaatacaatactagttccacacgttatttatttcatattatatgagagaaaactgacgaatgtgtttattctttctcggtcttatcgtctctctttctctgggtggatttatcaacaattacaagcaatacttgccataaggaagcttcgcaatttcgaaaacttagacctttcttgagcttttctgtaagcaaattatcaagtggacggcacaaacttgtatttgcggaggaaaaaaccttactacatgattaaaatgggacccactcatagagcagaattacagctgcatccatcctaagtagcatattataaacgctgatgcttcttagataacatttatttattatttttattattaagattttgaatcaaataataacctgtgagtaaatactgtgttgtgccaagaatgagtaattcagagtaaactataaacttcaacaaccaaattgaacaaagaaagtataaacacaatcaatatattcgaacaagtcacttctcatttattaatttctccccttttgtgtttgtgaaaatacaaagtttctttcaaacagtttcaaactttctcacaattacaagagaaagaaaattacaatgaaaacataaactgaacactctaactaaaagctatttatagcctaagcttctgacaacttacccctgtaacagttataaccgaaaactgttatatagaaaataaccgctaacagaaataactgttttacaaagtcattgttaaatgtaaaactaagtggaaaactattgtagtattcacagacataagttctaacctctctatcaccactgtaaaaaaaaaaaatgcactgcaagttaaacacacaaacccgttgatgcttctttaatatgttataaaaaatattcacatattgttatttgatttgaaaatttgattctatatgatatataaagaacttgatttaaatttctctctgaattttttttggctataatgctaaatagtgctttgtaattgtggaaatttataaatgtagcatttgatattttctttctcttttttaactagggtatatggtggcggttgataacgaagttgtatggttagatcaagaaaatcccatcaacgttgagtttggtttaagctatgggttgtatagctaaaaagaatgtgctcctataaagaagtgagcaaagcattcacccaatttttgcaaatttaactgttttgatttggagtgagaattagaaggtatcctagctaattgaacattgacgtcttaccctcaaagttcatgcaaatagccaaatatcattcaggttaagatagatgtaggaaaaatataacacattgtttttcaggtaaggtggaccataacgtaaacataatgctctatgcaataacgcttgaattatcattacgatttggaaaggagcatatgggctaacatatcttagtgagattgctaattgatatctgggctgctgttgtgtgctttctctcccaatcattccaaaacatgaagcagctccatgtgggctgggtctcattcggttggtttatcatcacatgtctgtccattaggtcatttctaattgcctgggcttcactctccttcatcttcaatcgttgttccacttccaagttacacgactgaagagtctaatgcagagttcaacaaggtaattaacattccttaaactcaatttcctaaataaagttgaatctcaaatcttatttcatttcaacaattcataagtttcccactttaaattaacccttcattcctctaaaatgctttttttgctcatgctaattaaatcagatttagaagacaaaaaaaaaaaaaatagttcaagaaatcaaagtaactcatggtgctcaaaattgtccggggtttttctttctcttccaaccttaggtgggctatgtaataattttcaggcgtttgataggtacaagttccatgtttaggtgtacacctagctacatattagtggctttgcaaccatcaactaatattgctacaccacactcctaagccctaaggcatgcattttttttctccgtgaatcatgatttttgaaaatgaataaattttttttgattggtcattgagaatatttagataaatttcttagaaattaaagagttacaaatatttttattgattattttaattatttattacattatataatttaataaaaaaataacataatgtctttattatggtaaaagaaaaattaaactagaaaaaaaataggattctcacatccttacatacgaaagttttggcgagaaactgattaaaaaatattctcaaaaactatcattgtttaggaatgttaattttttaaaatgcatattaaacatagaaaactaaggttacacttgatttgaatgtttattttatgttatcattttttgaaaataatttttatttttaaatttgtaagattttgaaaatatattgagaaaaaaaatactctaatatatcatcatgttttcacttcttcaaaaaagattaaaaacgatgatctgttgttttcagctttgggtatgtttttgaaaaaaatttcagaaaaaaaaatattttctaaatttcaagcaaatatattttcacttttactttatattttctttaaaaataaaataaaaacactcaaaattaagtattacctaagtttctcaatttatagtttccagaaaataaaaaatttatctcctataaacgccccctggataaaaacagcacaaaataataaggatcagtttaaattacatcgtgccgtccatccataaaaaaagaaaaaagagcaaatgctatttacgggtcactctgtctattccttttaatatcttctttgtttcaatgaaaggtaatacttaattttgagtgtttaaattgtgccaattcattaaatggatgagaaaaggcagtacccactgaaatagacaccggcgtcccactcaagttgaataagactcttacacgtaacaaaattctgtacctagtcatcatatggagccaagtaaacataaatctttctaaattaataattttaaataatatatctcatttttttttattataagaaacaagttataatacaaaatacactcatgcattgaattaaaaagatcaaagatattttaggggtggtaagtattgcattgatattttgtttaccacgttgatatgtccctccttttacgattacttttacaatttaaaaatatacattgatagattattgtagattaaatagtgcagatgaaaattgtaaaacaaaaaatatttacgaaatctttccaattattttaattatatttgtataattgacattaatctagtaaaaaaattatttcatttaattatttattaaatttagtccattttgagaagaagtacgtataataaaagagtctttttaaaagaaaaattaaatgtgaaattggccatgaatttcataaaggaatatctttgttcagtccaagcgaattaaatcagtactcgatcattaatatactaaagaaaatatatatttcaataaatttgacaacaaaaaaatatactatttaacagtttaaagaaaaattctactagtagcaattaatatatttttaaatattgaataaaatttatataaatttaagtaatcaatgaatacaatttttaaataaaaaaaaaatatatcaacaatgtttgcattaggtatcaaataaatagtatacgaacaaatttgaataattgatcctgctgaaataagtgataatattatatttttatttatttattttattacatcgtattatctcttacgtgtatactattttagttgtttatctatttttttttttcccactaactacttaacttttgccagcaaatggttatcacgcagacttgacaagtaataatttaaagactaggacaaagaaagaatccacaggttgttttgtttgtttgttttaatgatgatgattgaggagatccacaggtagtatcctatcctaagaaaagcgcgcatgaagagtgataatattccaacccgacttgcaagctcccgtaatcacaaagaagttttcagtttgcagagatggaaaagaaagagagaaagatcatggtggctgtggatgagagccaagagagcatgtatgcactctcctgctgcatcaccaatctcatctcccaaaccaacaagcttcttttgctttatgtcaggccaccttctgctttctactccttggatgccgcaggtttgttattttcactttcttaattattatttcagccttttgcactaacttatataatagtaattacttattttaccagggactaataatattaggtgatgtgtatgggaagggatataattttattttgaatttcatgggttacactttatttatattgctacgttaatatagtgtaacctgggagtggtgttggtatttttaattttattgaacaattcttgtatatatgtatataggttggcgtatcctttgtgtcacatatatataccatttctttaaaattgcttaatttaccgtattttacaacagggtatcacttttcctctgatgttgttgatgccatggaaaagtacagtatgcacttggctaattccgtcatggaaagagctgaagctgtttgcagagacttgaacgctactaatgtaatattgtaacgctactttatatgtatgtgtgtgtgtatatatatatatatatattcattctttgaaattaattgggattttgcagatcaatgtggagagagtgattggtgtaggacatgccaagaatgtaatatgtagtgctgtgaagaaactagaggctgacaccttggtcatgggaactcatggctatggattcattaagaggtaaccattgatttttcttggaggcacctactatatacagtactatatatgactaaattgccttcttcgttctaacttgcagggccctccttggaagtgtcagtgatcactgtgccaaacatgcaaagtgtcctgttgtaatcgtgaagcagccataagagatcaatttggtttccttttctcactacataccttcttagtggttggattggattctcaggaagcagcttccggggcatacctttaaccactacacatgcatgcaccctcttgttgcctacaatttgtgtatatatgctgcatttctttgttgttaaatcatgatacagaggtaatgttccaaaggttggaaatcatgaattgatacaaaccaccccaaacttatagtactaccacttgcacaaagatgactacaaatcttctgagttaacaggactaaccctttaatcaattaaccatttcaaaccttgctcaaatgtaacaaacacaaactggaaggtaagagctactattgcatgtctcgcttaatgcctagtaagtcttcgcattaattagtgatatgacaagtaccaaattaatgtccctccaaatattgcaaagattaggtattcctaaatcctaattgaagaagagacatggaggagtggcttttgatattttggacaagctaagcaataattttgtgggaaaagaaaacttatacgaactagatagggctggcccaacattgttttgggtctaaatcaaacttttagatactttttaaaattatcaaaatgatattcatttttttaaaatttatctttcaaaatattttagatgtaaaattatttattaaatcattaataatctatttcatttaagatttctttttcaattcataattaccctttttttactcgatctaactctcatcactaggccaactctagtggtttataacatagtcaatctatttgatattctttcaagacatagttggtctttaaataaatttttattagttttagctttaaaaaaacttcactgaagcaatgtttacttgataaataagacaaagaaaagactacataagtataaagaaaataatagtactattaactatgtaattcatttttgtgggaagagaaagttgaaataaaagaaaggcatttcataataaaacaatatttaataaattttagtaaatcaatattatttattaaataatatttttttttataaaaaatatcattagagtttccttgatcggtactgaacttgggccagctctaaagcagttgttttttacggcctctgcttttgggccagctctaaaattagtttccttgatcggtactgaacttgggaagccccaacctacattcactgagcaattttgtttaatacttagaaattgaagatagtattggaagtttacaataattcatatatatttttatttaactaattaaattagactatttcgatcaatcgttcatgaatgtgagaaaataactttttaattaacggtaaagtatttttgtaaattttatgatttctattgaaacagatattcgatgaaacaaaaagaaaataaggtataataaaaaaaaatagattaagttagtttttttgtaaacagttttttttagatgtgctaaacacaaagttgaacttcacgataagaggagagagaaattttgaataagggtaaaaaataatttcggttggttaaaatattgattttaatccctataaatttaataatttttaattcttacgtttatcaaaagtaatatgattgtaatcttttgtcagggaaataaaaacacatatttctagacaaatataaaaactaaaaatgttatatttttttaggaattaaaaccaatattatagggatgtaaccaatctgattactatgaattgaacaattaattagatacagtttgtttttaaaagttaaattgacaattggcaaatcactctggcctttataaaattcagttgaattgattagattaactgtttaaacaaacaatcatgaaattattgcttaatatttttttatatttcatattattttaattttatgttggtaatacttaatagcatcaaaagaatttttatgacgtcatttgtttggaacaatcagtgtaaacggttgaaattaaaactcggctcctattaggcacactcttcaatccatttgttaacttttttctttttttaggcaacttttatattaattaccataaaaagttatacttattacgctagtagtataactttttctattgatttatggtgtaacttttccaattttttttttttttacttttttacattaattagtacataaaatttcaataaacatgtataagatgtaacataagtgattaatagcttgatcctttaaatatataataaatgcttaattcctaactattagaataaaataatatttatggaaagaagagttacccttaaaactgatactctatttttttttttctgaggattaattttataatttcacgagagaaaaataaattgtaaatcttatgctttttttaccaatgagatccaaaaattactctaatcttaattctttgccatcaaactagtgtcaattattagaatttgggatgctaattctttatcatcttatcatctaactagtttctattattacaatttgggatgctaagtttccagaaaagttcgccttgaatgatgccacacaacccgtggttccttccacaggaggtcaagctcacgaccaaaccaattcgtcataattcacgtcgttgatggctcatcaaattaatgataatgatagcgtacaacataggctacttatttaattcattaattgatgctgttaatgcatgtacattttctgttggctactacccctcgacagaaaaaggttacaaggttacaattatacgacccgaaagcaacaaaaacttcattttaatccagtaggacgtcactagcaatagaagaaaacacaaaacagagagagagagaatttggagtgctcatgaaaattgtactgcatcatcacatattcacataccatccataataacctaatccagttagttaaagacagagtatagttgaacggttccttcaattccctattaggtaaacgaattctgcaacaacaatctaatttggaaaaaaaattctgcaattacttataaaaaaataacacaaattattactatgtataagtttaaaaaaataaaattggagaagctaaatttcccgataaactaattttaacttatgtagagattaaggctaaattacgaaatcgtatataagaaattaaggagggaacaaaaattgaatttaaacaaagatcaaccttactttttaattaatttcaacagcattctaaatgtttggcaacaaatttattgaaacaaatcatatctgttttaccttttatcttaatccaaatcgccatctccggctagaaataaagatgacaagatatcataactgtgtggtattggttcgtttaaggaaaaataaaataaatgtggcagacatcctatacccaaagtcaaagttggaagtgacattgtaaccgacacaaaaggctaaagactcatctaaacgagaacacccttacgtgcgtcaaaagatggagcggtttaaccaacctcaaaccccgatataatgcagtcctaacccaaacccctttagttaaaaattcctgagaaatgggaaaccaagtctcagaagtgaggggcaaaatagtaatgtgggatggttcggtgcaggaaatagagcaacctttgacagtggcagagttgatgctggagcacccagagcaagttgtggttgagttgcattcagcagtgaagcagaaaagggcaacaccattgccagcagataacaagttagagacaaacaaggtgtatctgatgcttcccattaagcgagggaagcccgttggattaagcggggaagacactcggcgcattctcttgatccttaattctgctctgcaccactccaagtttgttccctggctcacgcgtctgtgccagaacactactacaattgtcgaacctcagagaaaggaaataacaaaacaagaacaagagagctgccagttgtttttcccggaaatcttggaagggaggcctgaatatttgaataggcaggtttcagggaaagggtggaagcctactctggacaccattaaggagaataatattgacagaaaactcactcactggttgttcctcaagaccttttagtcatacatacaccaaacttttatatatatgcagtttgtttgttatctgtttttggtactgttgttttttcagttggagttttattccgatgatctaatgaaaatttgcagtgagtgtcagaatggattatcgaaataaaactctgcttttaatttgaaagtgataccaaaaacattttaaaccaactggatgtatttttgtttttttaagtatagttgtcaattaatgaaaatgtttgtggctttatgtgggtgttaaatgtaagaacgtaaaatgagagtttattgtatgtatttaaacttctgagacagaacagtgaagctacccaaatgaaactgggaagtcctttcttccgttttatttgggaggtcacaaatattttgcatgagaaacatattattcaagttagatagataggatttcttttatttattaaatagatagatcattatgcgcaataaaattttcttttggagtatttctttcatggatttattcctttttagattgaatttagcaaagttgaaagctttcggattagaacattactatatggtactatatatgcagtacatgcacctctagtcttgtacacggtatttatccatttcacaaaaaataaggtcgcttagtatttttttttttgtttttattttttattttcattttcagttataaaaatgatttccttttttcaaaattaactttgtacagaaatcaatgaaaacataaaaatagaaaacaacaaagaaaattgacaaaaaaaaaatatttcctcaaatcaaatagtaaattttaaataattaaattagtgatgctaaatttataatttatataattttttcattgattatgtgtaatttatatatttttaatttttatataatttatatattgacaaaaaaaattcctcaaatcaaataacttttaaataattaagttaatttttgtaacttttgtcaataatttatattttaaaaaaaagtttctcttaaaaacactagagtttcattttttttcacctaattaattaattgatgtattttcacttaagttttggcctgtgatatttccctattctcgtgagagcgagaaagagaaagttcaagaaattaatttataatatttattgtccattgatcataaaaattattaatcaagagaatttcaataaaaaaaataaaaaaaatctataatttaaagagaagaaacagaagcaaacttttcaaaatgttcctataagaaacactagagataatatttaactatgtacatgcaaagtgttcatataatttattttttacttaaatttgatattacaaagaaggaaaggaagaaaaaaaaaacctcttatgatctcaattcctacacttctgcgtttcccgggattatataaacaggaaaacagccacaagtccacagctaattatgaaaatcatacagttgtacaatccgtttggcatacctaattaagcaaactatcagtatcattcaaagcaatataatgcaaaccctcataacaatctaataaaaacatcataaaccaacaattacatcataaaaaggaaccaacacaatagactttgatagtgacaaacgctcataacgttaaatgctgcactagaatctaacagtgacaacataagaatttttttgaacttaacattaatatctttactactaacactgtaaaaaagaatccaagaaaaaagataagaagaaacttccgaggctggattttatatgtgcataagactcactaatactaacgtttgttacaactcgttacaaatggtcctttgggaaaataaaacccaagttttttctaaaattataacatcaattaaataaacaaaatctgtgagtatgttataagtaaaaaggaggctcattttcttttcactgtcaattatcaattagacattataaagatcatcactattagataatggaacattcttaaaataaaatataaaaaaaacgatgcatacgaagtaaaaaatagcagcattaattttagtcttactatgaaaagtaccagctcatgaattattctttaataatcaaaatgtacatttagtactttaagtaagttactaatgccgcaaaaaaactgactacattgggggtgttcctggtcctgggtatacccagccctttacccattaatcaaccagacccactgactcaaaccgagcaaaaaaaacttacaaaagaacagtgaaggagactagtgatgagagagaagataaatgcagaaaataataggaaattagagaggcgggtgagtgaataagagaatatgaatgaatataaggaaattttaataaagagaaactaagaaagaagtactctctaaaaatctctttgtattctatctaaacgatgtcctttaacatggtgagggccttcttggatagaaaataaaacgttaccatatagattacgaactatcacaaataattgatgaatgatatccataatttaatttgattgttactctatcgatcaactcaaaaattctaagcctttttgtgcttacacacttatgactaaagaactttatcagtcattccctgactaattcaagacttctttcacaaacctagtgtcaattggttgctaatcggtatcacataggtaatgttacaccatccatgtaaccccctttgaagttgatcgcctaagaaatgtagttacatagtactcataataacaattaatggtaaattaaaaggtaaggataattgttgaggcttgtgaataaagacccctacaagagtacccaggacataaattatatttatctcacttgaatatttttggattagattttgtaaatcctttataagagttagttacaagaataagtacaatatttgatgaatagttcaggcatcatttactctttatcagtttccatctagattaacacttaaacaaatatcttcattttaatagaatatgtttcagaatgttaccaaagaagaattaggaagacttttctttgtgtgaagactatgtttcattttgccaaacgaaattgaaaataccttctaaattttttgcaagatatttatttgtgtctagatatcaattgctaactttttaaagcataatttaacactttggccaccacttcacatatacatgacactgtagacctagcaaataatttgggttttgtttcccaaacttgtattgctaggaaaacatccatgccaaggaaaagattgaaatgttgaagactaataggaaaggttgattcttctaggtttatttatttattttgcaaaagtttgaaattcctcatttatttttggaggaaggatttgtgaaataagtccaataaaatggaggaatcatattgaaaagtcatatataacatgctttttattagttaattgtgcattaaaattaaatttagagtatatttaacaagttattttagtagtttataaactactttgattaatttatttgaggcatgaacttatttgaatactttctaacttatttttaaaagttacttcaactaatgaaactcgataaataaaaaattaacttataaaaataaacttacttatttttaaaatttagaaattcttgtacttattttaacattcaactaataatcgttcagttagcttttaagtttgttttacacacacactacaaaaattaaaacgtatagtcctacaaaattatatcttttagcaattagaattctgctattgtcacgggctcaccatttttcttaaatctcaagcaacagttacgtaaatataaacataaaaatgattgtctattgcttccttttttttggttcaggaaaagtgatcatgatttcagttgcaaaaaggttatggagcatagagcatatgttgatgaccattacgggtaataaggttcaggcgtctttcagtatgggctggcaacctcactttttcatctaaccgatgaacacagaacaagaagtatataatgctcatcccaaaagacgaaataaataatgccgaaagaggtgaagtcttaaataaacactagaacgacggcttataacttctttctttcctttattttttctgttagaaatatatatatatatatatatatatatatatataattctttggaagatgccaaattagcagtgtctcaaagtaggagaaaggaaaaaaaaagacaatgcacttattcacgccatttaaaaaaatatgaaaaaattatatataatatataatgaaaaatttattatatataacatgagatttatattaagcatattatcttatatatttataataacagtttcagaataggtttcttaaggtttgaggttgtctatccaaaatgtgtgtaatctttcttgtcttataggtctagtatgggtaaactatccctcaaccgcaagcattatggtatgaaaagactaaaatatttgcagacctcagctcaaagatgatcaaaggatacacaacctcttaatctcaaatgtttgtggtggcgaatgtgttaaaatatgcggatctcacctcaaagacgtatgaagggtacaataaccaacatgaccccttaaagattacatgtgcatgtaatcgccttccaaaaaaaatgacaaatataatggatgtagtttttgcattagatgtgactttaagaatcttaaaaaaatgcaatattatcattaactataaattttaatttaaggataagtatttgatcaaacaaatgatatcaaaataaagttgtgaatttaagtttatcatgtaaatcaaaaaatgtccaaccaattgattaaacataaatagtcaatgtactggaattaaagttgaattggtctggtaatatccgaattcaatctgataaaaataattattaattaaattttatttatctctcgatcgaattttagattaatcaggattcatgaaaaagaaggttaagaaaaaaaaaattaaaaaataccttaataaagtctcttaaactatatgattttgagaattcttatagaaaataaagttacacccataaatcattataatccaacaagtcatttacttatataaattttaatgttttttttaaatgtttctgaaaaattttacctagatatgcattagaatagatgagtactcttgaactctcctacatctatatcctagagtcacggaatctaccacataacatctggttgcatagtaaaagtgatgaatgccttacatattcaacgctaattaaattacatggggacggtagattctggctccatcacatacgcacacctaagtttatactaacaaatccaccaacttcatttcttcaatatctgtaactatttattatccccggccctgccagatgtgatcctacaatactcgtggagggaacagtgttaccaactcagcacggcgtttgcaagatggttaatggcaggaatatgctatagtgcactgtgcagagaccaatgcatgacgcagtatatggcaactttctgacacaaacttgttcaaaggtccttattataaaaatcctaccattgttgtgtacttcatgatggggttcttaatggccagccacttattggttagttccgcaagtgagcaggaataatataaacaataatgtcaataaaagcttttattggcaccgtacagtatccatcatgctatctgaaatctactacagtagtattcaatctttgggaacatgatcaattgataataattatggtactagaaggaaggcgcatgataaataatgttattctgttcaacatatataaaaagaaaagtaatatagtatgattttccgtattgcgtatggagattcactaggaaaaaaattattattgacataaaaactttttaattatttcatttttagcataaattgttaaccttctacaatcaaatgagttaaattttcctatctcataatatcacgttctgtgttcgcgcataaaaatgagttgaatagatgtaattgggtaaatatcatcaacaatttgtctgttagtagttaatcaacaattttttgcaaaattttaagaatgtaagaacaccgaaaagctattcagggtcggcgcccgacaacctttgtggccttcaattccctgtgatgcttgtgtgtgtgtttttgttccgttttatttgtttttttttttttttatgttttccttttgaactctgggtctgtgcaatgagcctggttagaaagtccaaggaagttaatataagaagatcacttaaataagactctaattctagacatcctaatactttattacgaatcttaactctgaaatttaacacaggtaaaggcattttatgcctaaaataccatctaggaaaagcttcattatttgtgtttcttatttacgccattctgcctctgcccttagtttcaataagccaaaacaagaataggtcatatttaatattaaacattagatgaatgaattggagcaaagataagaacgaagaaaaagtgcgaaatggcgaaagaaagcagacaaaacttctgcaacacattatgggcaccttcacaagagtaatatctaacaaagctttccaatgttcttccgatacaatcagatcgcaaactcaagtgggtactttgtcctgtgctcaaccacgtgcacactactaatacatactgctactccaattacccatatccaaatataaatcattttaattctctggtttcttaaatttgaaaaaacctcaccacacaaaaagtgaaagaagttatgatataaatgattaaaatatgttttcaattcatagcgtgtaatacatctaagcttcttgttcgccacctaaaattcttattggtattgtcctcatctgtttctcctttcttatctaggtctatttattcatataatataattgagggggaaaaggatatgcaaagtaattgtttccctctttttatttattttttcttcatatatgagatctttcggtaataatgcaattttatatgagatatccaccacagtggctggctctgggtttgtattgagttatgatctgagccagaaactctgtcctagatccgaacctcacttgtaagcgaagctactctaaaccaacaaacacttatataaatatctaattaaaattggagagggaccaatattttattgaaatttaacctctactttcttcatatgtaatttccgttggaccggactccactttgttttgatgtctctgatttttcaatcaatttctccctttcaataatgtttgtgatacactcaagctagttcaggttcaggttcggttcattttgtaagttaacagctcaactaagagtaaaaacaaaccatgcagcaactcatacatgaacgattaaatagcttagcactgatttgacattggtagcaaattaccaatcagggcaataattgattatagtaaaattgcaaatcatataacaaaattaataaattccaacccaattcatccactttatatgaaaattgctacatttgatggaatagtactatgcaacaaagtcaaaaatattttctcaataattgtcatatttggcacagggtgaaatccgttaattaattacacctaccgattgtaatgactcgtgagttgcccataagtattactcatttcggtgatggatgctgtttctttattctggccaaagcttctctagctttcaaaccagatataagaagaaattttggacaacctaatcatgttactggccaagataagttatgcttgccagataaacaattgaaaatgttttcaccaaaaaataaagaaagtcaatctcatggcactctatctaacatttacacatttgtcgtaattattaatgtctaacgagtaggatcaaccatactcgaggaataggatcatcaatgcccatccaaatgttggaccgatacgactaaagacaccagcgattgccaatcctcagtgaaaaaactatatatattattttcaattttatatgaaaattgagcttatttttacaagaataatattatttttgagtcagtgaagaatgactagggataaatactaaatgctataaaacaaatattagaaacatactttgcagtttgcatagttttaaatttgccaaattcactttcgtgacaaataagtaatagactaatagtatactttggtttcaaaaccggcatgcggcaggtgaattctctgagtttttaagttgataaattggcttagagaacttttgttagtcaccaacttgtgttgaaatctcaccagccaagttgctttatttgccaagaagtagaaagtaaaaaataataataataataataataatggaaaatccaatgaatcaaggccagctctctatctacaacaacatggcattggatatgtcatgatgtcccttcacctatatatatatattgttccatcagtcccataacttctcaaaccaccaaagcctacggctactacattacattcttttttttctttcccaaatgggttccatcttttcacccttaaccactatcttcctcctactcctactcgtactttggggtggcgaggcacgtgacccttttgcttgtgaccctaagaacaccgccacaaaaaacttaccattttgcaaggcttcgttggcaacaggggcaagggtgaaggacctcattggaaggttgacactgcaagaaaaagttaacttgctagtgaacaatgccgcggcagtgccacggcttggtatcaaagggtatgagtggtggtcggaggcactacatggggtctcaaatgtgggccccggaaccaagttcggtggccagttccctgccgccactagcttccctcaagtcatcaccaccgctgcttctttcaatgcttctctgtgggaagcaatcgggcgggtgagctttttcttttgtttgcgtgcaaatattcactcacaaccgaaataataataataataataataataaaacaaaaacatttagcaatcagtggcacatataccctcatattcattttttaaactattcatttaagagtgttaatttgtttttaaatgcttggtagtttagaaaacctaaaaaatatcaattatttttaaaaatacttttatttattaatatttactaaagcgttaattatattctattttttgataaaaatattattttatcatataatttgtgtaattaacaattttgttaagatgcatgttgtctttgattgatgtgaaaaggaaaagaaaactaaagggaaagaaattgacaaaatactcatttaatttaggcggaaataaaagaaaaagataaaagtaatgtacatttcacgcatattttccttctcgctactttagtcaacaaaactgaaaaaaagttgagtctgtgagacttttctttcacagtcgcatctttcattaagaatgtttatttcttaagtaataaaaaaaacatttatcatctccctttaagcacatgttggatacagtttcaactttcaatatattaaaagttaaatattgaaccttaataaaggaaggaaaatagatgtctaattaacaatggccaataattaatgtgaaggttgcctcggacgaagcaagagcaatgtacaatggtggaacggctgggctgacatactggagcccaaacgtgaacatctttagggacccacggtggggccgcggacaggagactcccggtgaggacccaatactagccggtaaatatgcagccagttacgtgagggggcttcagggaactgacggtaaccggttaaaggtcgctgcctcttgcaaacactttacggcttatgaccttgataattggaacggtgtggatcgctttcactttaatgcacaggtgagccttatttaatggtattttggaattttggattgggataatgggttatggccttatggggaatcttcttcttaaggtgtggtgcaccactcatgttcatattacgcactgctcaggtcgtttccctagtttggtagtactgttgtgttggccaatttgtccactttttgcacttttgctaatccaaaatgatttgtaggatgtgggtcatttatgtttaatttggttttgtttgaattcaattctagctaaatcaacttggacatggcatgtcagaactttaaggttcggtatgtaaccttgaaaatctaacaaacacgcgagggtaaaaagtgtaacaactcaatgatagcttctattaaaaattgcaaatgctagtttaaattgaattgtattttgcacaatattctttaggatggatcacgttgatgcattttgtagttttctttaccactttcagcatcccttgtccaaacaaggatgacaaaaagggcgcacaatatagtaaatattatttttggtagcaccttacttggaggtttatgggcaggttagcaagcaggacattgaggacacgttcaatgtgccattcagaatgtgcgtgaaggaaggcaaagtggcgagtgtgatgtgttcttacaatcaggttaacggggttcccacctgtgcggaccccatcctcctaaagagaacagttcgtggccaatggggtcttaatgggtaagctcacaaactatgccaaaggctaatgagtaataattaggtggtcctcactttgtgccaaagaattatcccaaactatttgctttcctgtgattcaggtacattgtatcagactgtgactctgttggggtgttttacaatagccaacattacacatctaccccagaagaagctgctgccgatgccattaaagctggctagttactaaatacaattaacatatcattattattattaggaaaaaataataagggcttgacattttggtcatgttacaggtttggatttggattgtgggccttttctgggacaacatacgcagaatgctgtgaagaaaggcctcataagcgaagctgatgtgaatggggctttattgaacacattaacagtccaaatgaggttagggatgtatgatggtgagccatcaagtcatccatataacaaccttggtccaagagatgtgtgcacccaaagtcaccaagagcttgcccttgaagccgcaagacaagggattgtgcttcttaaaaacaaaggtccttctttgcctctctccactaggcgtggccgcactgtagctgttattgggcccaattctaatgtcactttcacaatgattggcaactatgctggtaggcctccttttttattcccttaaaatattgaaaactgcacctaagctcactatgtccttcacctgcttttttaggtattgcttgtggatacactagtcccttacaaggaatagggacatacaccaagacaatttatgagcatggttgtgcaaatgtggcttgtactgatgacaagcaattcgggagagccataaatgcagcccaacaagcagatgcaactgtgctagtgatgggcctagatcagtccattgaggctgaaactgtggacagggctagcctgcttcttcctggacatcagcaagaccttgtgtccaaagtagcagctgcctccaagggcccaacaattttggtcattatgtctggtgggcctgtggatataacatttgcgaagaatgatcctcgaatccaaggaatcttgtgggccggttatcccggtcaagctggtggtgccgctatagcagatatcttgtttggaacatctaaccccggtttgtcttcttttcgactaaaacttcctacacctcaaaaaattgcttctggccctccattgcatttcagaaaatccaatccaaaatgtaatttttggatggggaatatgccagaagtaatactcttcttttcactcttttaaaatagccccattgtaggtccaaaacaagttatatttttaaatacatacttacatcacaacatcatgttatgttttaattccaggaggcaagttgcctatgacatggtacccacaagggtacattaaaaacttgccaatgacaaatatggcaatgagagcaagccgaagcaaagggtaccctggaagaacctaccgattttacaatggcccagtggtgtatccatttggttacggattgtcttacacgcactttgttcatacattaactagtgcacccaaattggtctcaattcccgtggatgggcaccgccacggcaacagctccaacatcgcgaacaaggcaattaaagtgacacatgcacgatgtggcaagctttccattaaccttcacgtggacgttaaaaatgttggctccaaagatggcattcacacgttgttggtgttctcagccccacctgcgggtaatggccattgggctccacacaagcaattagtggcttttgagaaagtccatattcccgccaaggcccaacaacgggtgagagtcaaaattcatgtttgtaagctcttgagcgtggttgaccggtctgggactaggagaattccaatgggtttgcacagtcttcacattggtgatgttaaacactccgtgtcacttcaggcagaaacacttggaattatcaagtcctaaatttttcgaacgttacattccattactcacacaccaccaatcgcctttttcagcaaaatatacatatatagtacctgctaaataacctcaatctctacgtaagtgtataatagacagattaatagtgtgcttattgtcagggacattttaagttttacctctaaacttcctacatggtgctttggttctaaggaaccattgattcaaaccgtaaattgtttatatgtcataacctccaagacaggacgtgctagatttgattcatcaatcacagccaataaagtaatagggttggttgcgatttttggagaagagattaggaaaatgtattgttctctctcccattcatttctactttctttgccattctttttgcttgtacttttatcaatacaagacattagtatttttttttaaaatgtaattgtaaggttggtaataagaatgagctttttcaccatgatgtgcagagcttacacccacaggccagcttccattgttagtcatttccaaagacctaactaaatattagtagagcatatttttttttcttttgcttttgtaatgaattcaatagaaatatgaagtctcttgttacgaatggaatgcaagagaaccataaccaatcgtattgcttttttacttatttctagacagattttaacgcgacactcttattaattatcattgtacccaagtactgaaatgttagcaaagtataatttgtactgcttttgatgacaaattcaacaaaaatgttggccccttgctacgattggaatgcaagaaagcagaaaagcatattattgggagggggtgggggagcggaaatactcagctaaattcttaaatcataaaaaaaaatgagatggatagagcaagatattagggaaaatacatatatgaattatttaatactactagctttcccaaatggggaatgaataaccagaatggtgagcctcccatcatttagattttagagatggagaactactattaaggcaatcatgtgacatctaaaccaataatgatccaaattgatgacagaagctggcatgtgtgcgccaaaaaaagctcagtcgaaataataaaataaaaagaaaggctttgataatgaaaatggccttgatgttgacatataggtaatataagaagccaacagaacagagtaaagcatttaattcaagttcccatgttccgaaaatatggagtcacaaattccacgctttgatttgtattattcagctggaatgaaggacttcctctgttcaagattgcatccatctattataatactgcaatgcaatataaaaagggaatttaagtgggaaaaaaaatcttatcagtatatagtcacatcacaggttcaaagtgtattgtagatttatagctgatagaaaaactttgttcgtttttatttctgtctgccaacaaaagtattacgatatgccaatataggcatataatattaataagctacaccattttttttaatactttgtgaaacatttcttatgtttagcaggttgcaagagcatgaatatagtagatcagccagcacaatgttacccaacatataaattctaataaaacgaatgcttgactttgaattcaagcttctactttaacaattatacttgaagcttcatcaaacaattggtaagcactaagcagagatggtggccttaagaggggattggttttgggggaatatatttcttccagtagataaaaggtataaacaaagaatagaacaagcaaagtagcttcttgtgaggagctttcttttttcatccctagctagtcattagtcaaaggacaaactttagcaaaggctgacttataacatattatgaggagctcaaaacaatcaagagagaacgaaaaaaaaaggtacacccacgaggcattgcatatttttatgtttacttttccacttgtatctcttagaaatgtttccaattattgtggagacctctatgctcttccctctatgttaagtaccaacccctggaagagggatggctgataacatatttttggcacttcctttgggtgttgaattaagtggtcctacttaaactaaaaggctttcatcttttgtgcagctaattaaaagctataacacataagatagcgaaggatgactctacagagccccacatggctggttaaatttatgttgaacttattgggaagagttagtttgctgaatcactgatgatgaggacgaggcctaagaattgtcgaatgtcaacagctcgaaaaatgagttgaatcggcccactcgcccggcctgccatcaaccatcttgaattttgactttttgttcatgtgaccctttcaagacaaaatctgatagcattcacaccatatgaaatttttggatccataaaattggaactgattccctccattcatccattcacacattcataaatcagaatcgttagatgaagatcatacgcttcatatttttgaatatggtaagattagatttttataggagtattacaaaagtatgtttgagagtaaaatcagtttataaatttaagtttgtattacataaatttacaaatttgtatctaaacatgtactacatattttaaattgaaattatcaagataaaatgtgagtgactcttatcagtgtaatgtgtgaatgctagaattcctaactgtggaatctgatcccatattgtatactcatttctgcacaagtatggtgtttttttttttttttttggatttgtagtaatttccaattaatgttctggcgagtggttagctttaattttcagtgtggtttgagagcacctttcagatattagcttgccagcgtctcatttctttttattccttttttgaaacctttattacatttgtgccattttgattgataacagggagggaaaccaatagtataatcctcatgtgtcaatttttatgttgcctgattgatctaagtcttctaattcaaccgtttattatgattcatcatggttttgaaactaatagtctaatagtttatatgtatattactccttcataatggtttgcgacttaatagccagatcaagtttaatataatgtttagctgacagattcttttttttatatacaattagatgacagattcagagaaataataggcacacctacacacacatatatatatagcgcataatgcttatatttaaaaagagtaaatgattagctagaaataaataaaaaagagcagctggagcataatgtgtatctgaaattcaaatttgaatttagtgagtaagatgcattattggcaaagcttttgaggtaagcagcagagtgagcaaatcataccctcattaagctggccttgttggccataacataaaaatccattgaagctacacatgcatagcaatatgtagtatatgttagtgtattattattactatactgttggctcgcaaagcgaaagctacacatgggtcaccatcttcacgtgaaattccatcaacaagacacgtgcttcccacagaggttccctgagcttttgcagagaagcctttggaaacataaccacattggataacccatctggcgaatacgaggcaaatcaaatacatggctgcagataaggtttaaacgtcttcttacttttactaatgagtagtactataagttaagcatttttctaaggctttgatacaaatcaaaataaaatatttaatatattgaaaattgtaaaaaacaaatgttatattttttatcattaattccttaacaactatagttaagacctttctcatatgagttcaaacaaaaaataaagagagattttgattataaaaatagattagagaatattgaagtcattactttattttgccgtcgaaggaattatggaaatgctcgtgctaaaatcgcttttagcattgaatggttaatgcattttgtgagtgtttaccttttaaaaagaacatgcaagcttttcaaatgataaaaatgattatgtatgtattgttgttccacaggaaataagagccctcgtgctaatgaagtagaggaaaaaccttatccaagaatggtagtttaagagaatctttagttatgtgcgtcacactttgcctccttatatacaaacatgcctttgagaatggaaagcgtttcccgtaaattcttaatttttaatctccaagttatttctttaatcaatattttaagttgcaattactaagattgccaactgaagctgcaatccctttaatgattatatttatatctaaaggatcttattgtatatggatataagcaataaatggccaccctgtacaaagtgggaactttgtgggaatcctaagtattcctgattttggttttgttttaaaaaaaaagttcgctatgtgtggccgtaggacttaataacatcctaaattctaaaagtaggttccaaactactaaaagtatggatcaatcagaaatgattattttaatttaataagaggttttaattcttttttattgaaagagacgttttaaagttaaatattgaacatttaattaagtttcggatataaagaaaaactctaatattcagtgctgtctgggatattcttggagcttgaagtaaaaactaaaaaaggaccctacagaacaaaaaacgtatttcataaataattcatcaacataaaatttcatgaatttataaattcaaatataaaaaaataatacacaaaatccttatattgaaaatgaaattaatacatttttttccaaattttttaaaagctcaaaatgggagccacaagccgttcatcaccttgtgcatgcctgagccggcactgctgatacctatggtcaacaaaatgacaaatacctatagtaattttatttagttaagattgcatatcctaaaaaatacttatgatttcagttattgggccgttcttctggtgtagctaagcaataattaagtagttctgtttttttgttctttctttaattttcaagaaagaatttcggcggcgattgttagaattacacaaattaaatttgccctccttgcaccaataatgagtgttcttaaaattataatgaaatgtagttaggtatttcaaccatattagcatacccatccatcacagaaatggttccctttaaacataaatatacaagtacaacccattttttcttaatttatatataaaaaattaaaaaatatatattaatcatatgtcttcttagctaggtaagtgatatatatttgattaccaagtaattcaattataggaataagaataaaataggagcaaataactaagaggcaaacaacaacctatataagaatctaaatttccatgtttcttttttgttggaactaggatgacagggaggtggtgtgggggtatggatagtaaccatttgtcacctttgttagataaaaaaactgtttcatacttgtacagttatttgttaagtgagcatttataaattttataaatactatataacaggttttatatgtgatttgctctctcgtctcattcagattttcttttctttcaattgaataatgaaatcacagtgtaacaatttttatctcctttaaatgtaaaattttctctcttcgttgtggacttctttttagcggtgttgtgattatctatgttgttgttgttgttatatttgaactgacataaatttgattccctcgtattgagacagtggggcattggtggcatacttttctgcgtttaagtcaacaatacttataagcatatgatatgcatattggaaaacaaacaaggagagagcgaggggaaaagaaagagtaatcgcaaactaattggtaggtattcagacatgcagttgcatcagaaggaccatcaaccttacctgttgaattgtggataaaaaacaataattggcaataatagaaggagaatgaaaacgaaacaagggtagatccaaaagtgaaggaaagaaaacgaaccaataatggctgaaccaatcaaacagtacccaagaagaaacattagaccctgccatggggtactggatgagaccatcttgtaaaacttgtcatttcattaacaataagatgttaaaacacaacatgtgtgtcatagcagaagcagaactaaacctaaatgggtatttgatattgttagctagttttgtaaatttaaattgatgctccgaaataaattctataggaccccattgtcacacaaacaaacaaagatttcttaacagatcacgcctattcaaaaagttactaatatcctcgtcttggagaaaaagatttaacagaaagtgaggaagatcacattttaacttaggaatagtagctattggtactaggggataaagtagtgaagaactttaaactgaaagatccaaaacaaaaatatagtacataaaattgaattttgggatgtgggacaagcacaaacatcacataaaataagtggacctaaaatcgttcatgccttagtttccaccattgatgatctctaccaatgaaacggaacatctcatcacaatgatggaccccaattccttacaacctggaactccttagctgttctagcacagcagagaaacaactacatgtgtggaagataacaaattatgtagaccccgtttgtgtccttgccttgggcactccattaatggtcccaaacctatgggaacaacagcaatacaaatgctgcttacatctctagattcatgtgtaattaagctaatttctctagtaaagtttatgtgcatacgttttatgtattttaatcgataaaaataacttgtttagaaaaaccatcttttacttcgtataaatttttatttataaaagattcttaaaaaataccaattgcagagctgcacttctcgtacgtacggctacattggttttcattccctgttttcgagttttattgcagggtattttttttttcttctcccgtttcctagtaataaattttacctaagatatacagaaacacatgtagtattacaaaatttaaaacaaaataatgtatgacattatatataaaagctaaaacaacatttatatattaattattaaagaaacatttaaaattttattttaattcctattcaccactaagatgttagtttgagttaaaatgaactcaatctttttaactaaaatcttattttaaatcttataaatgaaaaatatataattaaaagttttttcttaagtaaagttttgttaaagataatcatttaagttttttttatatataatggatcgatcaatcgaattctttaacaaaaattttaatagataaatattacagtaaaaaaatctagtacctattacccatcttcgaacttgaagcctaatagtcgttgtgaagttcccaaatgataagtaaatttgtcattcttactaataatttacattaaaaagtatttctttttaaaaagctattctatatgataatacattctatattatttatttcatcttttgagggtatcatttgcacgaaagaatgatgaatactttgttaattaatgaaagatgtcaacatcaacttattcttataatttccttacgcaaccgtgtcatcataatatagtgacatatggagcatgatacgaaaatcagaaataatactcttccatatattttcatcaatcttatttttaaaatgcaatgaaaactacaaaagaaattaaatctaacaatattgttgaagttgaaatatggcacacctcaatcctgtgtttgtttgttgttacattgttgagaaagcctaaggtcgttagtttgagtttgaattgttgctttacttttaaatataataagttttagttgatgagcagcgcacctaattacatcattgaatatttgtgcacagtattgattgattagttttattttgtactgcgtattgattgattagctaaacattacaatagtgtgtattacatttctaaaaccttacatattccatataaagtattattagagctatttgcaacccaatactcgagtactaaataaattcaatatcatgcatgagagaaatgattctctcttttttgtttgttagcattaatgatttataatactagtgtctattagtgaatttagttttttcttgttgacaattagaataattttgctggaaagaaattctgtatcatgagagaaagaaaagcaaaacaaaacgtttttaatttattgaactgttcctgggtttatatgcaagggtcaaatcattgatcatgttatcatacaaaatatgaactatccaatccacaaaaatgcaacaataataacgtcttaaaaataaaaataataataacactggaactaaataaaacaatggataaatatttatttggatccttaagaatgttaaaagttgatatttcaatcaagatgaaaattaatttttagtctcttaatatcaaaaaagtatgataaaattatcataccattaacttttgaatgttaactctcactattttgtatatgtgacgtttttggatcaaattataatgagaaatgttgcttagtcagagaaattagtaaaatagacttaattgtatgtcaaaagttgatggattattttattacccttaaagattgcttttattttttccttccctcgtttttttattgttgcaatcccaacttcactcccatcatctcttttctcctcttccttatatcttcttctccctcccatggacttattgtaatgaagtttgaaacatgaattccaaaagcttactcctaacatacaaggttaaaatgaatttttttccccttttgcttttgattttgttccattgaatttttttttgtaaaattgattgagtgttcttgtagaacaatcgatttcaagcaaaactcatatttaaacttgagtaactgtaaaaaaaaaaaaaaaaaaaattgtctgccaaacttccgcacaaaccaatcgtgttcctcttttgttttctctcaatttctccctcattgctcaaccattttttaaatcagttgagggctttggtagataaaccaatctagcttgagcaagtcctatgctagaacttgatttttcgttcaagaatgaaagagaatatgtaaaaaaaaaaatgattcaacatactgttgcgcaaacgcagtttgttctttgtacttatttcttttttatcaaacctttcacgaaatttgttatggttttttcccccaacatgctggtcagttcgcaggtcaactataaacatgttttctatcattcgggcgaacaagaggaactgacatgaaaacaaattgggagggaagctggattgtaatagtaaaaaattggggtagaaaaaatgaaagtgacaaaataatccataaattttttactgacaaataagtttattttattcatttcactaactaagcaataccatgtgcatttctcatgacaatttaatctaaaagtaccacaagcaaaaccatgaaagttaacagtgaaaagttatcgacaaaattatttagttatactttttaaacattaaaaggctaaaaattaatttttattttatttttaaaagactgaagcatgaacgcttaagaatttcaagaacaaatagatatttaccctaaaataattaaacaaggaaacaaacaaaaacggtattatggaatggagaagggtacttgggttgtgggacccaaatccaggaatgccacgtggagacaggctagcattaaagggtgacgtggcaaagggggggtaatggaaatggcaaaggcagtgcccgagatcacaggaactgtaatgggatatttgtgaggcaaggtaagttactgtaagagagccctttaagacaaacccatcattcacgtgctttcattaatcaaagtatcaaaccctccaaaaagaaaaaccaggattcctgtgccttgtgagagaatgccctctttccattgcccataaatattctcatcattatcactaactcctccttactcttttctctatcaccaattttttatccctaataatcatatgtcaagtaatttataataatttatacactttactccatcaattaaaataaattttcttcacacccttctttaatctttgagaaatcttattaacacgtttattctaatacaatataattaaaatatatttaaaattattacaaaattatgagagatatttattaaataagatctcaaattaataaatttttaataaatttcaatttaaaaaaaatgtatcaaaatatgtgtttttaacatttcccttattactttgctccatattcattcctcctcatcccgttaaaaataaattagtgttttatgttaaaatcacaaacaatgatctgaaatcacttacaattgttagttttatatttgaattagttaattattaagaatgaaatggaaaacaaacagttaatcaaaaatattattaacttctagccgtaatttctataaaaaaaaaatatcacagaaaaattatttgttagagttataatatttttttatcaaataaaagttgcaatcttaaattataatctgaattattatataatttaaataataatatcaatgattttttctattaatcaaattacaatttgaaaaaaaaataatcttgtccaaatacattcttaatattaaaccagtttatcagaggtgttttgtttgagtgaaatagataagaaacataaaataggaaaataggaaacaaaagttaatcaattttttaaatcaattgtttttttcgtcatattcgtttttaagagtttaaaatcatcataaaatgccgaaaatcactagaaaatactctcaatcaaccaaattatagagattttctaaaacttcaagatcacgctcttctttactatgtgggacgcgaaaattttcaagctaatgcttgtttcattaattaatctcaaattttcaagctaatgcattttttttctaaggtgtcagttataaaattttactctcccattgaatcaggtcacacactagacgctttttcctatattttatttataaaaaaagagagaaaaaaatgcaggcaataaattgaggtcataaacccataacaagtcgcaatattattaatgcggaagagaatctaaatttatagttgtgttgtgggttatgatgttaatggatgaaagtttacacttaaattaaagatgtcagtggtttttttttttccagtgtaagccatcatctttcactcacccacggaatcaagtaaaaaactatacatttttcctatattttattaaaacagaaaaaaatacaagcaatgcttataaaatatttagggtcataaacctacaaggttcaatattgattaatgtgagagagaatttaaattacattgtattgtcttctatgatgttaaaggatgaaagtttaaacaaaagtcaaaaatattaataatttttttaaagatatatattttttaaagtgttagtcgtaatctttgacccgtccactaaattaaatcacatttttcttatattctaatgaaataaatgcaactcataaatttagggtcataaaccgacaagttgcaatattgttaattaatatgagagaaaaattaaatatatgacgtattaacacattaaaggatgaaagtttacacaaaagtcaaagttatcaatatttcttttaaggtattttttcaaagtgtcaatcataatctttcacttgttcaatgaattaagtcacatttttcttatattataatgaaagaaatgtaacttataaatctaaggtcataaatccacaaattacaatattattaatactaaaggaaatttgaatttatggtcaattgacaaatatgatattaaaggataaaagtttagacaaaagttaaatatgtcaatatttttttgtaagacattttttttcaaggtgttaatcataatctttgatctatctactcaatcaagttacattttttgtatattctactaaaaaaaatgcaactcaaaaatttcaaatcataaactgacaagttgcaaaaatgttaacacgagagaatatctaaatctatggcgtgttggtaattattgtgtcgttaaaatatgaaaatttgtacaaaagttaaaattattaatatttctttcaagacatttttttgggtgttaatcacaatctttcacccttccactcaatcaagtaacatctttcatatattttattaaaaaaatacaactcataaatttagggtcataaatcaacaagttacaatgttggtaatgtgagagaaaatataattctatgatttgttgacaactatgaaataaaagaatgaagtttgtacaaatatcatagatgtgaatatttattgtaagacattttttttcaaatgtcaattataatttttcacctatccactaaattaaattacatttttttatatatatttcttaaaaaatgaaactcattaatttagggttataacaagttacaatattattaatgtgagagaaaatacatatttatgatgtattgaccgtatgacgttaaaggatgaaaatttatataaaagtttaaattgtcaatatctttcaacactttttttgaaggcgttttctcttctacttacacttgtattttcaagcatcagtaaatcatccttttaacatttgaaagtctagaatattctctaaaaataattatcttaaatttacaattattttatttaaatttttaaatttaatcccttattatcatttttagtctttaaagtataaatatattaacattatcatttttaaattttagattaatacgattgacaaaattaattttcaattaattattttaaaatttcttagtttgaagaattaatgtatttttttgactaaaataatagtttaattatttacattccttgaaatttacactggatatgacatgtttagttaatagaaaatatataaatggtagtaaatctatacctttattaaaaaaaatatataatgtgattaaaaaaatttaaaaagaaaaagtaaggtaaaagatgtaatgtatttgataacgttgatagaatctagaatccctagtttgttcgtcactagtccattgcccattctctgtcaaactcgttttctctcaccctctatatatttcctcttcctgttattacaaagtcagagagagagagagagattacactcctaccttaataggtgggagaagaaagagaagaggagagcgtgtttgatatttatatgatccaacgttgaatcttctgccacaacatacaccatcatcaatggccgtgaccactccctgtctcaatgccacagaaaagaagcactggtggctttaccaacagaaagtaactcacccaaacattnnnnnnnnnnnnnnnnnnnnnnnnnnnnnnnnnnnnnnnnnnnnnnnnnnnnnnnnnnnnnnnnnnnnnnnnnnnnnnnnnnnnnnnnnnnnnnnnnnnnnnnnnnnnnnnnnnnnnnnnnnnnnnnnnnnnnnnnnnnnnnnnnnnnnnnnnnnnnnnnnnnnnnnnnnnnnnnnnnnnnnnnnnnnnnnnnnnnnnnnnnnnnnnnnnnnnnnnnnnnnnnnnnnnnnnnnnnnnnnnnnnnnnnnnnnnnnnnnnnnnnnnnnnnnnnnnnnnnnnnnnnnnnnnnnnnnnnnnnnnnnnnnnnnnnnnnnnnnnnnnnnnnnnnnnnnnnnnnnnnnnnnnnnnnnnnnnnnnnnnnnnnnnnnnnnnnnnnnnnnnnnnnnnnnnnnnnnnnnnnnnnnnnnnnnnnnnnnnnnnnnnnnnnnnnnnnnnnnnnnnnnnnnnnnnnnnnnnnnnnnnnnnnnnnnnnnnnnnnnnnnnnnnnnnnnnnnnnnnnnnnnnnnnnnnnnnnnnnnnnnnnnnnnnnnnnnnnnnnnnnnnnnnnnnnnnnnnnnnnnnnnnnnnnnnnnnnnnnnnnnnnnnnnnnnnnnnnnnnnnnnnnnnnnnnnnnnnnnnnnnnnnnnnnnnnnnnnnnnnnnnnnnnnnnnnnnnnnnnnnnnnnnnnnnnnnnnnnnnnnnnnnnnnnnnnnnnnnnnnnnnnnnnnnnnnnnnnnnnnnnnnnnnnnnnnnnnnnnnnnnnnnnnnnnnnnnnnnnnnnnnnnnnnnnnnnnnnnnnnnnnnnnnnnnnnnnnnnnnnnnnnnnnnnnnnnnnnnnnnnnnnnnnnnnnnnnnnnnnnnnnnnnnnnnnnnnnnnnnnnnnnnnnnnnnnnnnnnnnnnnnnnnnnnnnnnnnnnnnnnnnnnnnnnnnnnnnnnnnnnnnnnnnnnnnnnnnnnnnnnnnnnnnnnnnnnnnnnnnnnnnnnnnnnnnnnnnnnnnnnnnnnnnnnnnnnnnnnnnnnnnnnnnnnnnnnnnnnnnnnnnnnnnnnnnnnnnnnnnnnnnnnnnnnnnnnnnnnnnnnnnnnnnnnnnnnnnnnnnnnnnnnnnnnnnnnnnnnnttttcttttttcttgatccaaacgcgccgttttctgtagatcgtagagaaatacatgagagacgctcggagtctgatagcgacgcaggaacagagcgagatcgcttcagcgctgaaccttctcgacgcggctctggcgatctatccgcggctcgacgaagcgctggagctgagagcgaggtcgctgctgtatctgagaaggttcaaagacgtggcggatatgcttcaggactacattccgagcctgagaatgtcgaacaacgacgactctggttcttcgtctgtttcttcggatagttccctttcgagggagggtgtgaagcttctcccttcctcgccctccgatcagactttcaagtgcttctctttctctgacttgaagaagaaggttatggcaggcatgtgtaaaacttgccacaaagaagggtattggaggtaataaaataagcattatagaatctcttgcattggttttacattttggatcagatcggagccctcatatagggatgaggttccgagtaaatgctcctgcctgccataatcataatgaaatgtttcccaactccttccttcaaaaatcaaattaaatttaatgcaccatagattgcacagcgtggaaagtcacggaaaatgtaatggagagttaaaaggatttccactttcaagcgtctgggagtttcattttttaggtccaagtctttcacagtaacttagtcatttttacgatatttttcgcaataatttctataataaaaagaataattatacgatgtaataaaaatatttaaaataataagaaaatttgctctattaatttgttttaaaatatttatcttttttaagaaaaactaggaatatcacttatattttcatttatttatatttgacttattattttaatgaactcataattgcattctcaaatattgtgttattataatttatcatgcaattaatattttttttattagcataggcagtttaaatgatgaattaaaactttgactgtaaaattattttttatattttaacttgatgtttagtattttaagtaaataaaaaaaaatgacgagtgttgttaacacagtctttaatactatactcattaatcattgaatcttacaaaattataaatagggtttactaaatattttatgagtgttaaaaattataattaatgttctaattttatttataataataacagtttataagcacattgtgtttaataatgtactctagcacacagtttttactgaattttaaattttctttgttttatcctattttaacaatgagatttatatgtttttgaaatttttagtagtaattgaaatcgggttttgaaggattggttagaaataagagactgtattaaattctttaaacatatttgatagatacatgtgtatagaatggaaattcatgtttacattttattttttttagatacatttttgcattttatttggataagtgaacaatgagatccaaatgcttcaagtcataagttattataaactgtttttgattcgattgattaaaaaaataaaaaaaatcaaatgtaacgaaacagatatttttattttttatggagtgtgtattgtctgagtttctaattttctattctatttaccaacagatacttggttctggggaaagcatgttgccacctaggcctaatggaagacgcaatggtccttctccaaaccggcaaacgcctagccaccgccgcattccgccgcgagagcgtgtgctggtccgacgacagcttctccctctccaactccctcttctcnnnnnnnnnnnnnnnnnnnnnnnnnnnnnnnnnnnnnnnnnnnnnnnnnnnnnnnnnnnnnnnnnnnnnnnnnnnnnnnnnnnnnnnnnnnnnnnnnnnnnnnnnnnnnnnnnnnnnnnnnnnnnnnnnnnnnnnnnnnnnnnnnnnnnnnnnnnnnnnnnnnnnnnnnnnnnnnnnnnnnnnnnnnnnnnnnnnnnnnnnnnnnnnnnnnnnnnnnnnnnnnnnnnnnnnnnnnnnnnnnnnnnnnnnnnnnnnnnnnnnnnnnnnnnnnnnnnnnnnnnnnnnnnnnnnnnnnnnnnnnnnnnnnnnnnnnnnnnnnnnnnnnnnnnnnnnnnnnnnnnnnnnnnnnnnnnnnnnnnnnnnnnnnnnnnnnnnnnnnnnnnnnnnnnnnnnnnnnnnnnnnnnnnnnnnnnnnnnnnnnnnnnnnnnnnnnnnnnnnnnnnnnnnnnnnnnnnnnnnnnnnnnnnnnnnnnnnnnnnnnnnnnnnnnnnnnnnnnnnnnnnnnnnnnnnnnnnnnnnnnnnnnnnnnnnnnnnnnnnnnnnnnnnnnnnnnnnnnnnnnnnnnnnnnnnnnnnnnnnnnnnnnnnnnnnnnnnnnnnnnnnnnnnnnnnnnnnnnnnnnnnnnnnnnnnnnnnnnnnnnnnnnnnnnnnnatcatgggaggaggaggctgctgccgagaagcagaggaagaaggttctagaagctcaattgatgagtaatgagaaattggaagacaagaagtgcaccgtttcatcgccttcgacggcgaacccctctgtttatcagggggtgttttgccgcgatattgcggtggttgggaacttgctttcgcaatcggggttcaaccgctccattccggtgaagtacgaggcgatgagctgctgattcctccatccccctaagaatctctgcttcgtcgctttcttgtacagatggacaattttgtcaccctctttttcttttttgctctacatttcaatgctcatttatttagatgtacaaagtatattagttttcaactttacttctaatatttgcagctgcatgccgctaaactaaatcttgccaagttttaaagtatgttgcgttatcgcggcaatgcttacttaagacaaattaaattgttttcattaaattcttatcagaaattacagtaaaaaaatactatattgttcattacttttaatgttttttttagtttctgaatcattaatgtatggttgatggataagaaaagtattgattaaaatttaaaacaactaacgtgctattaaatggtaataaaagaagtggaatactaatttttaatttttaaaagagacatgttcttgtctaacgaattcagtaaaatgataccttcaaaaattaataaaaaaaaatgacaaacacaatcctcttatgctatttagggaaggtgaatgtctttttaaaacttagagcgggtattggtatcatttaggaagataaacacaatccttatagtataatcattctagagtgagttttataaagaactaagttaatcacgcttgtttattatttagcaagaatattaagatttgatgttagttctcatatgtttgattatatctcatcttatattgttatccaagtcatgagtgaaatataactttgtttcctctaaaaaaaaattcattttagatgagtcatacaatataacaatagcacatgaaatttaaaacaaatcataaaatggttgtaaaatttagaagcatttttacattaatttgttttaaaattcttaaaaactgtattaagaatgctgcttattaaataacaatatttatataagaatctgttccttagtttaagaacccgacaactgatattgaagatatagggaatgattaaattgaggttatttagttgtgatgaaacaaataggaaagagagatatagatgatgggttgcatatatataaagaaatttcattgccgaagagaggagaaactcctttctctactatcaaaccagaggtagtaaaccgggctctgtagcttccaatgtctggtccaaatgcattcaattagattttcttaattagcatttgtatccaccaaaaactttgccccttccaccccaagtaatttctcaatcctagtcataacattttttcaattaatcaacaaaaataattaatttaattaatcatattatatctatcaattatttgtactgatattttaaaattatgcttcttatctttttatctatttaattgtatatatataaaaaataattaatacatctaaatttttttaaaaaaaattataaaaagagataattaatttttttaaaaataatcttataattaacaactgtgtcagtataattgagccggttggtgattctgatttgaacctcctcgcgtaatggccaatttatgtactacttcacggttaccggctctaccagtctagtgtgatgacaaaataatatttgattgggcagggatgtgtgttggcttctgtttggtataattcttgctagtataggagtattaaattgaaaagtatttttaattattaataaaaatagttattgatattttaatatatttatgacttgttatatatgtatcagtatgataaatataaattatctgtatttttagttgttaataataattttttttaacatatttacaatttattacatgtgtatatgtaaaattgattgttgatgttttcatcaataattgagttcacttagtattcttttctcactataaagtgaaattatttattttagagctctaagtttttttaaggtactgttggttttaaagtatataatcacacttttcaagaatatcacaatagaaatatttatataacaaatttatcctttcctatatacaccttgaaaaaattggagcaacaaaaatatgaacacactactaaaattaaaaaaattataatgaattttctaaaacgaatgttctaagaactaatgtgaaaaatgatttcatatatgttatagaatttttttaggaatttcacaagtttaaaagaatgttaacaatatagattaattgtacgaataaatcaatttagaaagtaatttataaataaattgtttatatatacaaccaatctaaaagttttgagaataatttaaaaagttacaaaagacatccacattctttgtaattatactgttcttgcttatgttattgaacatggatttgtgtacatgaggttatctggattttgaacaagaactgaaattggtgtatatttcttttaaaattattaaattagtggattttttaaataaaattattgtatgtgataaatcttactccctcccgtctcgattataagcaaaaaaaaaaaaaacattttatattaagaaaattagttaatttattaaattatatcatttttaattaatttttttaaaaaaattatccttcattaaaacataatattaagcttaaaaaatatctttagctttattattaaaggatattttaaaaataatctcattaaataagatatatataattgaagtttttttatatttaaaaaaaatatgagatttttattgtttatattcgaaaacatatgaaatattacacgagcatcactttatttttaaatttcttaaatatgtttttttggaccccacaaatatttctagctgttaataaaccatgagaaatatcaaagttcttaaaaagttcgccgattcattaattttaggttaaattaccttgtttacttttagagttattgtagttttatacattctagcttagtctttttagttgtgatttttatccttttatcctcattatcaagtttcaaactaatgttgtttgaagaaaataaatcatgttagttgaaactcgacagcttttaattgtgtcgaagcttgtttttctgctatattcttaattcattcatatttgctatattcttagttgaaacttgatcatgaaaattaaaagagtaaaaaagttgaaattctaaggaccaagatagaatgttttaaattatataaatatttttttaaaaaattattatagctataagaactaaaattataactaaatcttaatttttaaaaacaaaatatactaattggattcagtagctgctggtggcaactgtggaagagaattatgaagtcgtgtacaagggaaaaagtggtcagtttttcttaatcagttctgcacacacatatacaacaaaagcaaggtgtgtaatcagcactcaatacaagaaaacaaaggattagagacgaaacgtcaattcaacatttacccttcacaagccttttaccttgttttccgtactatcaattttgtttgaatgttcaagacttttaagtttttatatattttaattgttatacacgtaataataatgctattgtaaaaatttatacagcactgtttacgtatggcaatttcaagagggtagttgtggggaatcaatgaaaaggcttcaacagttcaacctcctaagcctaataattgtcttttgtttgaggcgtgctttctgatacacgcaaaagcttgtgcatttcttcttctgtgtaagagatgcatcattacacagattccctcatctcacttaggaggaaggatccaactgttgcctgcagataaaagtttgaatatatccacatatatatgctgatttttttcttttttataaaagaaaggtacttaaaacgtgagagaatattattcaaagagacaaaaaagacccttcactcagcaaataacaacaaatgtgataactgatgacgaggtcaaactgtgtgccactatgaatttcccatatgaggggagaaaacaaggctttctcaaagtgttcattaagctacttttaaaattaagcaaaactgtgtgtcatggttggaaggtgtgagttgcttatggaaaaccatggttcagcttgtccacattactccaatacagtaaaatacaaccaagtatgagaaagaattcgaacaaaaattgcagcctcctggagaggaagacaatttgcaaaacaaaaagtaaatcacaaatgcaaaacagattgagtgcatggttggaaactcattgaaaatggaggaatcacatttgggactaattaagaagctataattaattattagcttctgaaaatcatgtttgaaacatgaaattgaacacgctatatttgaaccaagtgtcttaagcatcagttctactgtccatcgcatgcaatattattactattaatggtaaatagatgtctcaaatggccattgaataaatgctaaaaggatttcctttttgtttttaagaataaaaacacagatttgggatgatgaataacattggtggaacagaggaaaacttgtcccgcacatctcctatttctatcattcatatataaacaacaaaatactactagttctgcaaaagcatggattatattatatagtcgttaaactttagtaggtatttttgaactgcttctctgactgtattattttttcccgataactttttctatttgaattttaatattcgcatttaaagcatataacaatttaatatatattgtgccgaaagaaaaggtgcatctcacgagggtaccatttctttagttactctgtggtcagaacctttgggggcctctacataagaccttgctttgcttgtattgtgtttggtctttttttctttttcaaaagtgtagtcatactaaatccataatggattgtctaggtttacatgaacgactgagttcatgacttccatcaccatgtctagaaatataacctacatccttttttggagttgtttttggttttatataatatattaaattaaattattgaattttgaggaatactttctgtattaaggtattggacaaatttttcaataaatgttttttaaagaatctcaattaatgtttataggagaagaaattatattttaaatttaattttaaaatctaatttaattcatgttaaattgaactaatatatgtgtttgtatgtatatcagtatatgtatatatatttataaaattaacatatcacccatatctttataggtataaagtttatttttttatttatgtgtaaaaaaattacactgtcaactaataaaaattataatagtaggtataatttattttttttacagaagtataagttttaatatcagtattataaaagtcaacatgacatatatgtcaatttgtaatagaatcacattgtacacacaaaaaaaaaaaaacgttgtaaaaattctttacaacactatttactcataagtatatatttatgaaattacaatacagtttgtttgttttctgttatcatattctttaaacttatattacattacatagacatccttttatatattatattaactttttaattatttgaaaaaattacatcatatattcttataaaaaaaatgttatagtgaatgttaataatccgaaaaaaattcagaagatgttaacgtaatttacattttttaaaaggaaaggcttggcgtccctgttttagcaagagaaaggcacaaacattagaggtgctatacagagggaaaataacacgtgatgtttgaataaagggaacattggaaagagtcgaagaggtggcaaggtatataatcatgcatgccagaggcaccatgtgctgctatcatgtgcctccttcaacgtccagataattaatcatggataatatatggtcttttctagagcttatgtcaaaattaggtggcattggcataaggtgctggaagaaatatctgaaaaattattttctcactatctattttgattaaaataatactgttttaacgatttatttcacaataaaaagaaatagaaattatgaaataaaataaataattgaaaatttagtaataataaaagtgaaaaagaattttgcaggaacaggaatgaagataaggaagcccgccccaacttgctccattgtcatccctagtagctgggagtgtgagataaggggaatcgaatttcattgccagttagagggggaaaaaagtgatgggtttttattgagatctgagttttcagggaactatattcctttacaacatatgctcagtggtttttatgtcactgtatgcaaacaaacctatcaattttgctaacctatatctgatatcaatcgtaatacactaatgcttgaaggacagtgtgaaaattaagtaaccaatgtttgaatcagatttcatttagtaggatctctgaatagagggtaccatagtgtattgttttatagtaccctagtaatctatatgtatctgttccatcattaaggacaggtagaccacgacatatgcatttaaatttcatttagactttattgttctcattgaaggcagatagaccacaacacatgcaataaaaaaggatcatgttatgttacgtatccgccagacacatcagatttgcctcaacaaagaaaagttgttatgggcaagaaacatgagaattgttgtaccatgaacatgaaattagtaataagcaaacaaagctttttggaattactcagtggtgtgggagggggaaaagtagggtgccttaagccttgtagtacgcctttgtactggggattggtttggttgcttgattgctcttgtactttcccattaaaaaagcgtatggaaaaagaataaataatcgtatgaaaaaatgatgggctttgtgataagacgtactcgttttaggttgaaaagttaaacaaagcccaatacatttcccaattcatttaagaattagtagaacctgaagaacaaaaaaaaaaaaaaaaaactaactaaactaaaaacctactcttgcttccttgtttgtttgtttttcttttttctggtaaaaaaaaaaaattcactgtttctattcctttgttatccatcccatttagagacattatctggtaaaaataaaatctcaaattattcaaaacgcacgctccaaaataagaatatgaatatttagacattatctaaagtgcaccctctaaactcattttagagaagccaaatccaaacaacttatatctattcaattcaatcccactcataataatattgctttttttttgttattttttaacattatcgtccgtccaacttatgtgaactgactattttctcttttgtttagaagtcactttcctctaaaactacacaaattaaattatatgtagtcaattaccttatttaacaagttgctcaaaggattcaatattaaaagtgttttagaaattctttttcctgtcatgtttttattttaatttatataagacaacttaaatacatattcttgagtacttttggtgtcattttctaacaaaaataaagttaattttttttttatcacagaacatcattggaaaaaaaacacagttttatccctttgtttacacatcttagtatttatcaagagaaatttcgataacctatgttgtgttgaagagatatctatatgaaatttcgatgacctatgttgtgttgaagaaatatctatatgaaaagacagttctatttctattctattaatattttttattagtattacattcgatttagttagtgatgcctttgccataaatgcggagcttcagtccagacagattagaaacctcttgccattcacctgagtccataaataacgtttgcaaaaaatgtttgaaatcagcattattttgttaattactaaggattgtacaaaattattattattattattacaactttaatctagggaccagggataatgttggcacaattcaggtatgttccctaaatgaaacgatgactgactcaaaagggggagggaatatgatattacgtacacttggatgaagataagacagtctttttccttttactgggtttgtttgagcagtttcgggtgctactgcactttgggcaaaaccaatcctcctcagggacagctgttagtggaggatcgcagcaatcgatatgggtaccgattccacacccgacggaaccactttcatcaccacaaatcagcattacatctcctctatcccgggatccacatactttgcaaattatatcatcatcacgggaatcttcaggagcaacgagttcttcaacaatctcttctgccttgcttttaagtttatcaaatgatttctctgcccaagcatgactgccatataatacatgtctctcaagggagaacccgggcttgcaaacatactcaaccaagtagtccgctacaacacaaggtatctcatgttttaagaactcttggacccacgtgtcaacacgtggcatgccagggctaactacagcatagtcgattccggtaccaaggaagcgggtataaggaggagaagttgctaatattgttccatctccagctttgatgacacgtttcagagtatcctgtaaaacagttgagtcggatcagaagtacatacatgtcatcaacaattataaagcacggatgaaatggttggaacctcgttatcattaatgaccaaagaattatctttattttaagttgctttacgtatccatatccggtattgatactcttgaatactttacagatacctatcttgaaagtatttaagcctttagaaagttatgaaaattcattacatatgaaacataaaaacgtgtataaatatatgcaaaaatatagaaacattggaccttaataaactaaatatttatacaaaaacatttacaaatatatattcttagaatcattgtgtccaatatatgtatcttattattatctctgcaattcatagttaccttatgtttggacatcaagttgcatcaaaatataaagaccagtcctaaagcctataacaattcacatgaaggtcatgatagtattggcatgtagtaaaagaatattaaacgaaatgaattatttttaaaaaaaataccaaaggtggagcaatgcaatcgccgtacacaacaatacgcattccatagaaggctccatgacctgttctttctttcaacaaccgccactttctcggagcctccatattgattgtgccatcctcactgagaccattctggtgccactcataaggctcctctgccaacaattttcctgcctggctactggcagttaggaaatcagttttaagaatccacctgcattccaccagagattaaagagtatttatatgcaatacataaaaaaagaaagcaaactacactgctgtaattattagaagggggcatgctatacgagctttattttagtttatgcataccttcctgatgcagcagcagcaaaaaatttctctgtcctgcgtatggggtctggagctatgaagtgtgttgcctgatatgaccactggtgagaatcccggcaaacccttccttttaaacgcttgattacttgttgaaactcttttctctgtagacgatgcccacttaatataaaacatgcggcttcagtttttactctcgtgttagattctgttatagatggattgagccccgatttcttagacttgatctttgctggccttacactagatttaatagttggattaccattgcttctgccctgctctccatcaattggcttattctccttctcttcagaaaaattctctgacttatttctttgaacagctgactcgtcacttttatcatcaggaagggacatttcttccatggtttctatctctggctcatgcccagtctcattaggaatcttctcccctgatactgccatattagatttcgataattccttggcaactgttgccttggcattaccagcaggacattttcttgcttgattctttactaccagtgaagatggcttctgtttttcagttttttttgtgcctttcttaggaggcattgtctcttcacattttgttgcagggcaaattacttccgacttctcttctgttgctgtatctgactttttggaaagatgagattcttcattgagtgccattcgtaactcgtattcacatttgtcatctggggcctcaatttcatcgttcacaagctcagttctgtcaccatcatcttcagcatatttactaactgtggccttgactttacccgcagaaccttttcttgcttgatgctttactggcagtgaagatgttttctgtttttcagttttatttgtgcctttcttaggaggcattgcctcttcacattttgttgcagggcagattgcttctgacttctcttcttttgctgtatatggcttttttgaaagatgaaccaagtcttcatcaagggccattcctaactcatattcacatttgtcatctggagcctcggtttcatcgtccaaaaactcagttctgtcaccagcatcttctgcatttttaccaacaatttcttgctctgttgttttattaacatcaaagattttgggacatccctgatgcatcttcgcatcacaagttgcaatctctttgcttccactggaacaagttacaccttcaccttgcagggaagttttagtcagggaaagtgattttttctgtttagcagtggcacctaatttaggtttagaacccaaacttctcttggcaaccgacttctttcggggtgagtttctaaccagtttattactttcttcagtgattaaatccaatttagtacaaccagcagattccacattacatgactttttgtttcccagagaagaacaatctagatttctagtgacattatgttgctctgcttcatccccatcaacttgttgcattccagaatctgtgatatcaggcttgccattaattttagattcacttaagctctgaacagccgtttttggtgaattctgacagacattatcacactgaacagattctgggtttgcatttcttgaaaaaagctcatcaaatgccagtgagttggaggtagagcctgaaggtttcaaaactaagcaagtgtttgagttatttataccatctttgcctatagaaaaatagtcatcgacttcaggtggctcatcaacctgagatgtcacttttaatccttgagatttaccatttgctgacgggacacaagtcttctttctcgattttaatttagtaaaagaagcttcatttatcctcttttgaggcaataaactaattggctcatcttctttaataaaatcatttcctttcccagaaacttcaacactgatagatttgacacccttactagcccttttaaccttattgttatcacagttgttgccttctctgcctgagctttcatctaagatccttgggagagtaaatccgttttggttcttcgtagaataactcacagttctaagcttttcatttgaatgtgcaactccaacagcacttgcagaaggtgctctcaagtcacttgtcaatttcttagactctgagatgtcgccatgcagagcaggcttctgaccagacgaatttgtatttcccatattgccaagatcctggcagccaggtgcctttggagaatcagcattcttagactcactgatctttacatatttgtcaggtaactgacatgatatagaatgtctagaaacatcagaagcccaatagcttatcttagagtcatcaacattatgaaagctcgagtcttgatcaggtctgctcttatttcctggaatggttaaagagttttcaccgttattgacatttggcaagacctgtagaccagtagaatctggtaaggccttagatgcctctcttactgatttcgacaatccaggagtagcagctataccaattttagaaccaagggggctttgttttctatttcttccccctgattgtcccagcttagaatcttcagcctcttcctcagaatccttagcctcttccaccatcgtctctagttcaaaaccactattcaaaaggaaaaaaggttgagtaattaattgaaaggataagagctttcaaaagcaaagggaaaataaacaagtaatgtttatgtcatcttagggggaaaaaagcgattttatcacatattcaaataaaatctaaaatgcctatcacagtaatttgcatttcaaacaagaacataatctccattctcaactttcatattgtatgcctattattcatccacatgcctctatgtcagtttaaagtgcaactttataaatcccccctatttgtgatacgatagtgaacattgcagtgcatgagtgtagatcacgttgagatcccaaagaatgcatgaacggatgagcagaaggtgcattatgcatattgcatttagattattagccacaataattatcaaagtcatccaataacatgaatcaaaatagtagaaatctccaaatatacaagagtgtgtgataagcatggaatcgtataaagaacaatactgcccccattcagcctctatgtcataatacgtgaaatgccacatttgcgctgcatgataggatgtggaaaaaagtgcattccaaattatatttgcacttttatacggtacagtgcctaacctcttgttatatttgtcttcgggaagaagcacccattccttcaagctgaagaaataaacagcagcactttaattgaagagcactcgaaatttatataattccaacaagtcaaatgaaaaggctcaaatagatgagattcattcccatcacatctatgtaaagttaacatgaaaaagagatacgtaccaatcttccaaccaacgatgattaactagctttattgtgcccaatttgttggcaagctcatacttctctcctatattgaaaaagtcaaattttaaaacaccatgaacgaacaaaatgaaatagcatacacatgcagttgactgtcatgccaaaattttagagaacaaaacaaaccttcaaatttgtagcatatgagatgagtaaccttgtttgccaccaaaggcttagaaaactgtgcacccattaggccaaccattgtctgaagaggtagtaaaacaaggtgaagtcaagtaaagttccataagaatgtgcacaaactcctggaataaatcaacaaaataaagtataacagatgctcaccataatgtcatcccgatcctgacgtagataaccagtcaagcacattatcaaatcctttgcacctggtattccatctaagtctttaagaggtctgtacataacctgataagtggaaaacacaattttctcggttagagagtaaaatcactaatttactataaattcatcctacaaagaagcacaacaataaaaccaaccactggttcacaaaatgactcgaataagttcaagaaatttctggacacggaatgtaaaaaaaaaattaaaaaaataacaaattggtctcgtgtatatatccataaatctgttcaaccgcaagcaacttcaataatttctatcttaatttttataatgtgaaactaactaagtctatccccctatgtaaatttgacacatggtacaaagtgaaaataaatgtttggataaaagtaaatgtctatcatatagaagtacttatgaattgtgtataagttgtttctagaaattgagttaaattattttcacaagttattattcagagcttattaaaataagctaaaaaacagtttatgaatacatcattacctattttcataatctctcccccatcacacacttgcacaagtgcttatactataaaataagttgttcaaaacagactcaaaatatttcataagaaaaaattaaaggcactcgaattatgggaatggaagaagtaagaacaaactaaccgaagtagcatcaacaggcattccaatatcagcactgtgttcaacccacaatgcggtcacaaccgtcttccgatcatttctagcagcaacacacacaggatcgtcctacacacacaacaaatagttctatctcccttcaaaatcaaggccaacgatagcgttaaagaaagagcgaatcgaattgagctcacataagcaatgttatcaacaatgacgtgcgtgcaactcccaccgtactgtcctacgtcgactccgccgccattcacaagcttgaaccggatctacacaataacaaacagcagttcatcggataaataaattaagcttcacgccagaagagaaaccctattaggaaataaacgagagagagagggagaaagaaagagaaacctgattttcggcgacgggattgaagccacggagaacgaaacgaacaccgcgaaacattcgcgatgagtaagtcgcttcaatcatttgaagagaacggttttactattcaccggcagcgaaatggtaaagaagcttgtcgaggaagacttgatatggtaaccagaagcagcgggaagagggtagaagggtttttaatttatttatttgttgtatttgcataaaagaaaaagaaagcgagggagtttttatttatttcttcgttttgattttggaggcgggacgatgaaatcatgaaatctcaaatgggctcatctggcccatacatgattgggccgttccgaatattccagaaggaaaggaagtcaactaaaccggtttattcattcaatgagcgccagttggatagatagagagagttaaggcatcagtcatttttttttcctacatcccgcatattttttttataataattccgactgagttagaccagtttatattaaacaaaatatagttcaattaacctcagaaatttaaactaataggttaattatattaaaaaataaataattttgttatataataataaaaattttaatgtacgtattttttacatataaaaattagaagtttaaataaaaataataagtttaataaaaatttatatatgtaaaaaatatattattagatcaaaattaattgttacaaaattaattatgcaaacttatatgtgtattaaatatacattaaaaaatttaatattatatacaacaacattaattattacggaccattaattttaaattatttcgtaaaatatatttttaataggtttaattaatcagttagtgtctatagttaccaaacttattgtttctagtggtaatagtttataatttgatcatttgttgttctgatgcagatgatgaaccaaaggcataaagtggagcgagaaaataatattggggaggaagttgggtgataaaaaaatgtggaggttgcaaagtcaaacccaaagcttgcagccatgaataagaagttaggcatgattcaggggttatcctcccttgccaatataatgtcgttcgggagtttagcaatacactcttggtacttagcaggtaaaattgatctctgattcagtttctgcttccaattgtatgaaagacaagtgagcttcttgtgaagagctgtataagtgaggatcccagtgttcttatcttcccacttgcttgttttattgccaagtaaaaagagtctacaatgtctgcaatttatgaaatgtactatcaaagtattacggcatattgatcggccaagagaatcttatgtgttgccatggaaacataaatgtaatcatcctacctcacatgaataaaataagtattctctgctcgttgaatctagctgtgccgtaaatttaaaatctttacccagtttgccttttcttaattcacgaagggaaaaaaatgaacatggagtaacggatccattatacctccatttattatctagggcaaaataataaacgaagagaaaggaggaaacctagagaacaaaaatacttaaaatttatgttcttttaaaatcaattaaaaacatctttaaaactttattataatttgatttttatttttaaatataaatagattcccaaaaaaaaaaaaaaacaggaaccgatattataatttcttttttaaaaatatccaatcgcaaactatatttaaaatgacatatgtgaccatggtgagcaatttactttgccttcaaggattaaaaaacagtaaaaaataagtcatatttcttttaatggcatatacataatgcatataaatcgtagtgtaattcttttttccttcattgtctccccattcggataatagttctcgattttcccaaccattgaaacttttttagtcctcaatttcaactagactgaatgcagcaaatatgacaccagaatctcatacagtgtacaacttggccacaagtgtagcacaacacagcatcatccaccaaaaaagttcccgcataatactaaataataagacgtacaggcaagaagaataggaaagaaatgctgaatagagaaaatcatgaaaaagaaaatcatagacggcttatcacagcttccacctcagagggggtataaagatgatatgttggagccaccttggcaatgtcaacgttgttgggagtgacctaagatgaaaaatacaaaagaaacaattattttttattttccattccatttaggcggggcatcaattaattcgcagatcatgcatcagattttatccataccttctcttccataacttgcttcaaaatggataaagcaattgtctcggcttcttgaagggttaggtcctgcacaacatattaattaacaccaaattgcagtgttttaaaagtcatcttacagcacgttatggttcggcataattttagaaaaataatcaattattactaaaacactctgaaggagctaaaagaagcgtctagtgagagataatccttcagagcaacattggcagtgcatagacaaaacaattgaggaagatttggcattgcattaatttgactagtttaacattttccaagacaatacacagatggtgaacataaagttgcacaaaagtcattatgcttcgtagaaatgtaaacaggtagaaaaaaagggaccagtatcaaatgaacagttaagtatacttacatggtaagacaggaattgaaaataggattaaataaaagaaacaattctgcagatcatatggcatggtttgttttgtcttctcagtaagtaaaataaaaagtaaggtgaagtttaatttttgtgattccagataaaatgaatatattatttgaatagtattacctctttcatacattatttataattgtgggtaattattgtatagcatgttttcattttactctagctgccctgccaagagtgatgagtatgaggtctcctcatttctttatgttttcactcttttctgatttccaaacccatcaactataaatttacagttataaacagaaggttttgaaacaatcaatattaaattgttgataccttgttgaattgttcttgtagagaactgtctgcgccttcggaccctgaaccaatagcttttgcattgcattgccaaaatgtgcccgatggatcagtgtagtatctgataattagaacgtttcaattcagtaatgtgaacacatcagaagtccaatgaaaaaggatgggaacaagaccagcagcaatataaaactacatatcatctagtgactgaagcaataaagcctaggaagtaggcaccaacaaaaacagaatactcatgatctgcattagtgtgtctgtgacatacatgaatatgaaaagtgtttacaatagagccttaaacctttttaggtaagtgacctacactctacccctcaattgtttcctggttaagaaagtaaaacttgcaagttgcaatcatgaactgatctttattcagaagctaaaacaccaatgcatactttattgaaagtcaaacttgcagggtagacagctgaaccacaaaattaatttatgccacaaatcaatggtagtagaaggtaaagatacattgttgaacctaaaatgtcattctctttaaaccgtaaaaagagtgataaggtgagacagtactacatgactatgaaataactgcagaaaatgacagttcctacttccttcaacaaaggacggcaaaatatacagtgcattctttatgatttttttttaaatcgcttttgaaatatgtttaacatgtttgggtaagccataagctttttcggaaaaaaatcgaatctgaaaacgatcagattttatattatttttcaaaactacagtgaatagcttctaaaacagtctctacaaaaactcacatttttcagaatcttaaaattactttttttaagcttttgactcacaatagttataaaggctttaagggacgacagaagaggacttatcctcaaggactggaaaaaaagacagaaattaaagaaaaggaattcttagcaaaaaatatgcccaaattagaaaccattcaatacccaagtagttaatcaagtcaataagtgattactcaataacccctttcatcatggtcaaggtcaatcagcaaaaattttaattgttcttgaaatactttatgtccagaattccttttttattttgtaattccactaatccccagagaaaagcataatatactatgaataatgacatcaatttaaaacgaacactaatatcatagatttagactgttatgtaaatataaaaggaaaaggatgttcgttagttagttttaggcagctactgttattgtatggctgctaggtagctgtctacaaataaggcaagtctgttgtattttagacaggctgcatgataatcacagagtgcagtgcacatttccttgacctctctgtttctcttctctttccttctatcctctcaattctgtttcttctttctttccttctctttttccctctttctttctctatctttctgtttctttctctttcccacctaaattctataacataggcaaacaaacatttaaatgtaatcactggccaaacacagaaaacgagccaaaagaacaacttcatcacactaaccacaagtagccatttcctgacagatggaacaaatacttacaagctaggtccattctcatcatggccagcaatgaggagagaaactccaaatgggcgagactgccaaagagaaaagatatggtacatgttaaaatgcatacatgatggtctattgtgacaagaacacagccatttagtattttgtacaaaagtaaagcagtttataggcaaatgctactgaaccagtctgtctgaaaagcatcttatactatgaattacacatttaattataaactataaatgttgtacattcaataattgatgcaatatgaggatatctgtgcgttctgaaattttcaggtaaataactcttgtttatatttccaatcaacattcgtcaaatgcaatacgtaagacaccagtataattagcagatacataaataagaagcaactttgcaagaaatgtttataaattatttttcctaaatagaagcatcataaagcaagcaaacaaaaatagacacaaatatcaaagctgagaagttctttaccatggattcttcatcaccttcaccaaaacgcaaggctagatcacaaagagcttgggtggtggactcaacagtcatcggctcaccataggagaacctatgattctgtgaacaataaaccaaaatatgtcaatcattagctaatcaactacctaaaatatactataaggttaacaatacctgagtttccacccgtgcatgctcaacaagtgttcgagcatctgcaatcaacccactcattgcacaacctatgtgctcatcaatttccataattttctcaacactactaggctcctgaaagggaagtttcatgcaagcaaatcaatgaaagtgcaaagcaaaagtaatcagtacaagataattgtgtttctttctctcaaataaaagccatataaaattataaactataaatgtggttataagtatattagacgtttatcgtatgcagagaagacaacctgacaataaatgataaaaaaaaaaaggatctcgtctcacccaaaaacaaaaatgaagaatacctgtacagaacaatatcacagtaaaatgaacagcattatttttcataatatatgactatatgcagagaacgcattgtatctaaaatgaacaccaacgatcaaaattcagaagtgtgtccaaaaaccaacagcttggccccaaaaatcaattttatgtgaagcacatgtgtcaagtgttagcgatcaatattttgctcaagtttcttggttaattccatcaaattgtaaactgatagttaaaaattagtataaatgtcagagtgagattattaaaaaatcagtaacaaaattaaaaagtaaaaaaaaacggaccaggagcggcgaagtgatgcgcttttcaactgcgaggacaacaccctctttggtcttcaacccaatcgcagttgatcccagctgcaacccatttacaaacaaaaagggaatttagaatgcaacagctccaacaaaattctgacggacggatgaaacaatgaaggacgaaagcgacaaaccttgatggcttcgattgcatactcaacctgaaacaaacgtccttcgggggaaaaggtgttgactcctcggtcatactcagtcctgttagatttcactcacgcaattaaacaaacagaaaacccctaatcagttcctcaattaaatggaaatgcaaattttgcagcaaaagagggagggaggagttcaccttgtgagaaacatcttcaaaacgagtagagagagaatgagaagcgtttgtttgggttttatttgcttgctcctcactcactctgcctaatttgcttgctttcttgctcaaggggcttgccgtgtaaactctctctctcctcctctgttcattttggaggtgggtgggaccatgaaatcatgaaatttcaagtcgcatgggtcaactggcccatatacagttgggcccggcccatacatatctgggtttctttactgggcagttgatacaatatgaattgttaatggtccaaaaacttacgtttctgcattattaataggactctcaaatcaactaagttaatagatacattatgttataaataaataatatcattatatataatactaatatttataatttatatttaatgaacatgtaaatttacataataaatttgtgatgattattttttatctaataattaatttatttacatatataaattataaataaaaatcataggtttaataaatatttacatgtataaaaaaatatcaaatttatttatttatcaattgttgttaaaaaacatctaaatacatcattcaattaaacatcatatatatgaatcatagtcgacccgtaaaaaaggtaaagggtattttagtcctttcactatattgttgggtgtccaaagcgctgtgtaaacattctttggaatttttttttgtggccttcatatgtgaaaaacaccccccccctaaatatttgtttcatttgattttttgttttaatttagaaaaagttaaatattttttaattttaatttaactttttaatatttttgtttttatataatgtgcaaagatttattattgatgataaataaataaaaaattctatatataaattttaaaacaatttttgtaaaagttaacaggtttactatgataatatgtgtgattgagatgagagtatgagaaaaattctattgtcagtgtatttaaatttttttagttagtataaaaggttctttatacagtttatttctttcttttcattcactcttctacttatccaatttttctatttatttttatctatttaaataatatatcatttctattttatttattttatacatctatcatttatataaaaaaaaaatctattaattctacttcatttcatttctatttcaaattcaaaataaaaatattaaggggtctaactcggttttcatccatgcatgctcaataaatgttgtaaactcttagtaactacggataaaaaaattgacaataaaaaataaatgatagtcccatggagaataaatattaatctttattttgcttgtatggatgcaattatgtgaagattaattatttccctaggcagctttggactccagaccaatgaaaatcatgaatactttgaatctttacaactacttgcttgacgctacgaataataatatccaaccgtcatcgatattttaagatctttacaataataatgagtgtctagtgacccaccatccgcatcaatcaacaggaacatgaaaaatgttgcatatcgctgagagataatagctaattatccatccactatgctcttgaccagcgacttatattattattaaggtaaacttttaaaggagttttgaccagctaattgctcttgaccttcctgagagttaaattttaattttctaagccaattccataaatttttgcttacggcttgatagttggtaccaaaagaaaatgatgagatgcaaaatcggtttgtttaaccatatccaaatcgacgtgtaagttgtgtaatgctgccaaaaacgcgaaaattggaaaaattaaggtccaagacctataattcagactcaatattgctttgttggatggataggcaatgaagccacttggactgggtggtgtcgacttttccgtttttgtttgctagtgaaaacaccaagcgtataatgcatactagaacttgttgagtagacgaaagaatttggttccaaagtttgtagggtatttttggtttggcatgtgaatcagcatgtgcataaaatgagacatcgagtggaaacaacagaatctagctcgttttcatgaattggcactgtctttccttgtctacctatcttgcaaagcaactatttcatcctccactctttcaagttacaactaccagccccttttttagattacgcacgtaaaacatgagtaatctattgctttatcaaaacatttatctatgagattcagttaattgtggtccacaaatgacgaatttaatatcttacttacaaagggcaagcaaactattgtttcatttccctcgttttcgacaacaaccttgagaattggagaaatatttacaaagtcttacccattttttgttagtccaaccaaacactcaaaacatgggaccaatataagcatataacttgaaagaaaaaacaattaaatttttaaatattaattaacatttgggcaatattcctctacaagaagtacttgtaagaacgcaacatttcaattttgaaatcaatgaataaagaatcgtctaaatgtgtaatgtcctacaaagcatgtgccctcgccctatacaattgtccctcatgcttaataatgaatcatcttatatactcatttgaggttaattacgctatatgttcccaagagtaacaaccgagcagggaacaaaagcaacacaaacaaatgcatatgttgggatgtaacaaccctactgaaccttttcagggattctctccctgtttgtatcacgccggagaagggtgactggcgttgacccacattgattgatatcatggacctcccagcaacaatgctggtatcaactccacgaggtaataaaagaggccaccacaccttgcgccgttgctctctcttggctttacggatctggttaagttcttggcggatcacagttctcacagattttaagtaggaattcatgtcatgatctctttgtacacttcctccagatccataagcagatcggtcacttaatatctcaagtggatgaggtgagttcaagaagaccatctgagcagctcggagctgcttctctgtgtcattggattctgataaaggacaacacaaaagatatagaccactgcctgatggcaggagatgatggcttggtgaaaacttctcatcaggctgcagaatcagcagattacccattggtgcatatagtagcttctgcagtaaaataattcacgaagaagtcattcagagatttatatgaaagaaatttctttatccacttcaaaactttttgaaaaccagaactttacctgtttattgagacaaggatgactacggaagttcccattgacagctttcaatagttctgcaacatgattagggtaattgcaagaaaatgctcgtggtactatgtctctgtgcattgtaattgcttgaacatggctcttaggcaaacctaacttttctagcagactatcacctccacacatgatggatggggaaccaaatgttatcacaggaagtagagaggagatcggcacttcatgccttatcaacagcatgagattcacaagtaatgccaagcttccaccaagggaatgcccagtgaaccgaaaagtagcacgagagcctcgagattttaggtgagcatgtacctctggcaacatctgttgatatatccctttagcagcctcgtatatacctctgtgcacaagtacatctaaaccctgggcaaaaatgtgtacatcaatatgtcaatttcaggatagataattagatacacaataagaaagattcaaaagtatttatttataaccgtaaaaagaatgaaattcccctataacaagaatgacatgagaaaaactactttagtatgcaatatagacaattacctcaaatttaatcggctcaaaaagtaggtttgcttgccaggaagccaatgtctcagaaccctacatatatttattaattaaacctaataagaaaaggcactacagaaaatatgcatccaaaactggcagtgaattacagacagtctaaaatatcatcagataaataacgcaaataaatgttgggaaccacaataataatgattttatcatatataagctcacaaattctcgcaaatcacagcaaacttacaagtacaattatagtgcacaaagcaataacatgccctcaattaattctccctacctgaataacaaaaaatcttgtaccactctggtcattatcacagacaaaccattcacagggtgttgaatgtgaagagttcagatcatctgcaacagcttgctttacttcctcctttgctgcaaccactgctgtcaccgaatcagtagttgccatcaaagatgccacctctgtgtttagcatgttaacactgtcaaggctttcattgttccctgcaagtgaaccttcaccagccacagcatttgaggatttcaatggaaatatgcttctagtctgagaatgcagataagtggcagcagaggcggcaatattataagcagcagttgcacttatcttgtattcaccgttcttaggatcctttctctcttctttttcgtctaccttctcatcagtttgaactttctggggatccttttcagctgttgctgccactgccaattccttcttctctattgatgaagttacaaagcgcagaccataatgtttcaagagcttccctggctaaattatcaaatccaaatattataaattagtgttttatatgcatttttgtagaaaatcaaattcctagatttatcaatcaatttcagaacatgtcatttgaataaaaaccaataacagagctgtacaaaaacatgatatagttataaaaagtaaatggtaaaaaaacatagccccaccaacatactatccttgcagaactattcgctcaacatcgatcagatcacataaataataagtattctgttgttgttataaattactttcatcctagttaaattagaaaactcagacacaaaatgaaacaagtgtcataagttcataacaaggcacttccgatttagattaatgcttcatgaagtttaaacttaaacccttccataggtttttgaaaagttagacaaatcataacccacagaatcttcaagcaatcaatgtgtgctagattcagataagttcagtacaagacaagatctgaggtctaaaaaatctatgaatcaggctcaaaacaataaaaaagcacaaatagaaaacaaaagaagaatgaaaccgaccaaatcctacggtttaccaaaattaaaagaggaagatctcaagtctcatactttgattctaggtatatcgtaagccaagttccccaagtgtgacatctgagcgtacaatctagattcggctaacgataccctccgaagcattctcgaaaacgagcctctatcgaattgagcctcctctacttcatcgcaagcatcacattcacacacctcctcctcctcctcgtaattggtttgagtttgatcacgaaccgatccctcctcttcatcgcgctgtttcccctcccacagggacttcacatgcagaatcttcaaaacccagtttccggtctgccgttccgttccgtcatctccaacggccttcgcttcggcgttgttgtccgacaaaacggcgtcgtcgagggccaaccccttgtacctgctgttgttcccccgaggccagagagattccaaagggtaccaaaaggaaaatctcgaaaacaccgacctctgcggcggtttatccgatgcggagcgccccaccgtgctcacctgggaaggattggcacgtgcgtccagcgacccactaatagagatcgtgggaactatcccagattttaaacacatagtttccattcttcttaggaaacaaacacaatgtccacaacaacgatgatttcttcttttttaatttgcttcaaatgttcagcgtttcgcagtttggtttagttacttcttcactgtggtttaatttaatgttcttcttcaaaacgagagagagagagagagagagcatttaaagaagggcaaccgaaaaaggcacaataaaattaataattctcacaattagctatggtactacgtgtgtctacttctggtgacgtgtttcttggtgttaaatagacaaaatagtgttctctggagcgacggcgtcgttctgatgaaggggggattttccgtgtttggtttgggaattgcgatttgagagtagaaaaaagcgcgtgcatctctgacagcttccaaacttttagatgaaagtgccacgtcataggtagatgcagtgcacgcgtacttctggtgacgtgtcggtaaaagcattaatagttctgcttcctattgtttctattctggaggatcgccctgtgcgtcacgggtaatatcggttgctactaaacgccatacccgtcacaataacactttccttgttcaaaacgcagattttaaatatttaatagtcaattttcattttaatttagcatctcttttttattttaacaatgttctctcgaggccactttttttccctatgctgcatgcccgcattcctattatattaaatttgatatattacaaatttatgttattatgaatggatgtgtttattagttttagtttaatatttttttctaaatacatgtccatatatgtaattattttatttcttatgcctcaattatttatggaaatatgataatttgatatcctatttttttttattttatggagtcatattctaataatacaaacttgtaaaaatattggtatcatcacatctgtgtgttcatatttttatttcgcatttttttactaaaattaaaatatttttagaatttatttcataatacattggtaagtatatactaatattcgtttaatatgatttttgaatattgtatgcatgtcaatagtacaatggtataaagaagtgtaattactatatacacaaacataaaaaatatgatcgaaataatttgttggtgttgcccctatctgtctccatatttattgtgctaaaattataactcattcgtgttgtgcaagtgtgtttgcattttatttcattatcacatctaagatgcatcccatgtatgagattctaattgggaaaatgtttttttataagcttttgtattgaacttcttctttcccacattattgcaaattggtggggaattttgaccatcatcgtgtttggtaggttcaatagtattcccaatgcacatgttttggcataaatgtagaacctttgtgatatcaaataaaagagacttaacaatacatgtaaaaatgatttgtgccttgatacttttttgaacaacaataagtatttgatgaaaatctcctcctaataccattactttttccccaaatagagcatcacaatctagaatatcctttaatgaatgttctaatgcttctaaagcatatccctttgtcaagggtgtttcttttcaaattgttgttgtttctctaattagctttgcaagattagactgtttacttattgagcaaaatgaatctacctttacaatagatatcttaaatagagaatgtgtaatccgaccaccatataacagtgtcacaactatcccaaataagacagttgttaagataatttgaccttcacttcttgaatttgcaattaaagtgcaatagaggaatgtttcacctgtttctcttggaccaccacaaaaaaaaaaaaaaaaaaaaaacttgactttgtttatgatggataacctccataatggcattagaagcaattaattggtcattatttaacttttgtatacattgcacatcttcataatcttaaaatcaatttgtgtcttgtaagcatatatttttattaatttaagaaaaatatatatttttttaaaaaaagctttcaagaagctgttggaaaaagtaattatttcttcaaaataaattaattcaacacgaactgagtagtaagataagggttcattggtttaagctcttaaaaaaatgattttcagaatgtgtaaaaatgcaatttagtttttagagctactgggacggtttatttttatttttttaatgaaaaattactataattacttttgaacatttagtatgcttgtataagtttatgaaaaatataaaaaaatagatttatgattattttaaactgttttaagtagttcttgaaaaaaatgcaactgtatttaactcagaaattaaaagtacgtttacattggtaataaaaaaagtagctttgggtttttataaaatctctaaaaacatataaattacttttaatattcctttaatttaaaaccatattgtttaaaaacctaaacaaacggctctgaaacttttgaaacaagttaggaacatcaaaaggattttttgtagatgtgcaagtgtcggcaaaaggatttgcctacaatccaggttgcctatagtacatcaagaaattaaattatcttcgctttaaaggtgttatttctacatttgtgttcgaggataatggtaaccatcacaagaaacatgtacaaaaaaaggcaagctggttcataaatttaggagcataagatttaatccttttttattcatgttttacaaatagtttatcttaaataaggcggtttgttttgaaagaaaatcgattcttttaaaatatttttttgaattagactactcaaacaaaacttatctttagaagctatagatacttattaaactagaaaaatgagtctatgctagtgttgcttggcgactcgtttgctaaatcaacctagaataacgtgacttttgtcgtgcgaaacaagtaatactgattttcatctaatcaagttggataatctcaatttcagcatataaaacctactctttattgttccaagttaccaccataacaaatagaaatttcagcgagacagccaactataagtttgatgtcattagcaaagagcaaacttattctctgcaacccactagcttctccctattttctctcatttttaagtgtgtgatcaaccatgaccgagtaactgagcagcactaactcgagtaatgatttcagacacggcacaaagtcaatgtaagaaaggtcttctaagcttcttcgtatcttgacaaaaaataataacatgccaagaagacatgcttcaacgttgtataagaaaaaaataactaacaagagggagacaggaaactcaagctttactattactataactataaccacctaatcatgttacatgaggacataatgagcaaaataacacgtatcctgtattctaatcaataattgctattatatttgttttctgctcctctgttagtgagtttgggaacagaacctcaaacgtgacgtaaagatctcctttctttgtgctcatatgcagtggcatgccctctcctttgaacttcctcacttgctttggatttgtgattccctaatgatcaaaagaagtctgtcagatatgtgccttttcttacacaaagttaaatttcgtatcaattccaatgtgacctgcaacaaggttactttatgctcaccttcgtgcttatgtccaccagatgctcatctaggtgtttaacagtcttctcaaagccaacaagtgcttgaacctgaagatatattttaaaaaataaaaatgcacatagaattttaaggacaacaagagacgagttaatggttttcaaaatcacaaaatgttttaattcctcgaatagattagtatactttcctacggataaaaaaaaatactgttagtctactgttacatgccttgaacctgtccaatatagctaggaacatggtacagatcatgcaattgatatttgataacaatacaaagttgcgaattattgtaatgtttaccagtgttatagtgacagtggtgtgcaagtcattgccttcccttctgaagaggtcatggggtgctgttcggatacgaatctgcttaaaataccatatatattgtaagcaaactgcacgttaccatgcatacaaaacagttgttataaaaacatgaaaaaactaagttactaacccttagatctccagactctccatcaattatgggctcaccatcctcaaaaaatagcacttcctgtaaagggacaaaaactggtgactcaactgcaccactaatgatgcaaatttaaatttgaaaagggggatgcttttagcaagcttccttcacaaacaattagcacaccattatgacaaaatagagggtgtgaaaatggagtgaaagcttttgatttgtcctcgttgattggagaggatgcaaaatggttttctgctcaactttcttgctaaggaaaactaaataaatttgtgatgaaattgaaacaaaatacattcctaagcacatttttattgcaccaagcaagtgcatacaatttaggaggtgtttggtttgacttttgttttcactttcggttgatattctttttattaataacaaaaattgaacatgccttcatttagattcatatttccaaatttcataaaggagatgacgaaaacaacactttggtgttttcattatttccttcaaacaacaccttaatttgtgtcttcagcttaatctagaacaccctttcaaatcggaaattggccttctacatcttggtatttcttcagaaattagaatttgatgcacttaaaacaatcccttaacttctctatttctatttccatgagctctgtctatatagatctctctctttcaagcagacaagcaaagaaaaacatttttttggataaccaacccctgctcgaacactttattttttctagacttctactatagctctggagttccttgatggattggactaaaaaatagcaacaaagggctccactaatcgatatagaacgaatgatgacatcattcaatcagattcgatgcatgtactcgtgttaaatagttaaaacagttacattttatcttttcatgtgcacccatatttttcaacagtgaaatccaaattttcttgtgctagcctatattgagccactgtccagtttgtgctctaatggtcatcagaaaactctaaaaatgtgtttgatggtcttttccccttatttttaatgttgataaataaataaatgtacaaatttgcacacattgtaattcttgcaggatttatcggttgaaattgaagtgaaatcgtggaacggaatttataaaattcagagtacaattcaaacatacaatggtgtatgataatgatttcgaatcaattcaaactcaaatagagtttagatcagactcattaattatatcttaattccaattttattatccaatggagtcctagtgtcttcagaatttggatggacaagatttgacttaccttgtgataggaacctaaactatatgtgaagaccgaaaattggaaagaaagtgatgaataaagacacagatgaaaaattctgttaattcagttatgtgtagatacaaggagataaaactctcaaggtagtagtggcccttcaaaactgattaactcagttagctaacaactagtccaactattcctattcttcacaactactaccttaactcaaatttctaactaactgttgctgtaaccaattgtgttaactaccaaaaccaacttgctatcctagtgtttattccttgtgtatacacattccaaaccttattttgtggcttgagacctatgcctcacaccttatagagacgagcttatataaaaagggatgtaagacatgatactattcattatttcccattgcttaaagtttttatatataaactttgctgaaagattacctgcccatcttgcatgcctttctcaatatcaacagtgatgaaatgaccatctctttcatatttaacatttggacatttgtcacagacctgaacaggtaaattaagaaataggagtgaaaatttccagacatgtttagcaataggaataaaataaacctgtgcataccccctctcccaaataaaagagaagaacaattgtcaggtcttgaaaattagctagaagtttcagatacaaacaatgtcatctaggaagaatttgtgtatttgtattataaagtatgcatcccaatgagaagacaaaaaaaacaagaaaaagatccatccttttaacattcttaaagatgttttacctgctccgtgaactgttgaaacatcccaggacctatttgcttgtgataaagctcatttctacagttacagagtctcttcccagatgctggctttaaaacatttttctccctccaaacctgataataaaaatgtaagaaccaagggtcataaaggagagattgagaagcaatcgcctaatacctgagaacttttatactactaacaaaccagagtgctgaacaaataataatagcaaatagataatactgccaaactttacagtgagtgtattctaattacttcaatttaattttatttccatctatatccgaggcacaaaatgccattgatgttaaaaaaataagagacatgacacacataccagcctatcataatctcacttgaatgtatctcatgaacagatatacaaatctaatgcatggaaatgcaacaagagaagagtggttatagataattagatatgacctcacctttaaggaacctcccatgtacaaatcctcgagcgttgcatccaattcaacaagcacatcatcacctttcacaattctctcttcctcctccattggacctcccccgaagaagctgaaagaagcatccacagtaaactaagaaacacaaattcaacactcaaacccactgaacaagaacacaaatttcgtgcatgtttggtttaacagtgggtgtttggtttaacattaggagactctcaaacggttcgttgaatcaaaagttctgaattggtacttgtaataaaacgtgcatgggagcgtgtgcctaaagttaaagcaaacacagtcaaaatatttacaaattgacacactcactaacataaagcgacttacgaggcgaaaatgtcttggaattccattcccattccgccaccacctctgccgcctccggcagcatgctgtttcaagccctcttcgccgtacctatcgtaaatgcttctcctctcgctgtccgagagtacttcatacgctatatattgattcaacaatataacaacaaaacatgaattaattaataaaataagaaaataggaaaattgatatacctaccattgttaatttcggcaaatctcttattggcttcttggttgccagggttcttatcgggatggtactttaacgccagcttcctgtacgctctctttatctgctcctccgacgcgcctttcgggatttcaagtacgtcgtaatagctctttctgtccaaaaacattcataaattaacaacaaaacttgcattgcaagttgtgttgtgtgtcctcgttccttgcgatcattggtctggagagaataataagaaaacaaatagtggagcagagagaagtaatacccggcaatggcgtagagagaataacacagaagccataggaggaacaagaggttggctcttggactagccatgggaggaaaattggatcttgttacgagattcagacttgcgaggataaaccaaatcaaatcaaacgtaaatatatgtatgtgttggtggcaggggtgggattaagttcctgaaactgaaactgattccgcgcaggactaagatttagtgtgttttggatgagtgaaaaaattgattttgaaataatatgttttatatttagatgttttattataaaattaacttaggattaaaatttattataaaattttaaatttaatataaaagttacttaaaagttattttaatctaaaattaattttaaattttttttacggtgaaacaaacatataaaaatgtatcaaattaattatgagcttaaaattaatttccagaaccacgtacactttgtatgttcctaccaatatactaatcctacatttacacgttggatatggatactctattctctcccgtttttcccccattcacatggagtgttcatacgtttgagccaaaaatcatctgatccaaagatcaaaagaaattaaggttccgtttggatcactctctaaataattgatcgatccaatgtaatgcagtttttactaacacattttacatgcattttaaattttcctatttatatagatcccaagattttttctttcaaaagctgaactaaatacaaaacagagacaagcatcaaagccctaaggtctacaagtatatggggcttgaaagctaactacaagcaacgcaaagaccttaaagtcaggggcttgctattggcacccctcattactatttaaaccttccaaaaatgttattatttatgttgacgaaaatgctttcacaataaaataagttttcattatgtatttctatgatatacatcacaaaaacttatttccactgtgtaattgagtgtgagcagttttcgttgtaatctgaagaaaaaaaagttcaaactaactctccatcgaataagtaaattgatcttttttatttgggtacatgagagaaaagaaagaaaaagaaaaaaaaagcaaaaactatcctggaggtacgacacaaccaacgagtcaactaatgaacgaagggggctcatgcatcacaagaagaccatcatcctccgtagcaaccatcttatgaagggcatcatcgcattgattcccctctcttaagatgtgatgaatctcgcgaacccaatctctcgtgaagaggtgcttagcttccaaaagctcattccaaacatatgaaacaccgacatagaggatagatcctaaattttatgagtccataacaaaatactaattaagactctcttatatttaaatatttaataatagatatataatatcataatatatatatatatatatatatatatatatatatatatatatatatatatatatatatatattattttactaaacagataacatgatttcaataaatttaaaaaatatatatcattttttattttactcttatattattgtctattctttaatttatatctctaaaaaaattagatacacataaatatttatatacaaagtagatatgacaaagaaacaagttgaaaagtggatatgactctcttgattcttatccaccaataaggtaagaatgtttttaaaaaatgtaatattaaatttttaaaattaattcactttatcgaatttgggtaaattcacacggatatatttttaaaatattaattatatttatatttaatttattttttatatttggtgtcataaagaaaattctttatcttcatcattatcatttatgattgacaaaatatcattacatattaaagttgacgtatattttgttctttaaggaaatattaattttaaatcttattttctttataattttaatttttgtatgtgtttctttgacaagttggtatatcttagaattgaaaattcaatcaatgtgaatttatgattgtaaaacattaaaaaaattaattgagtgatatttttttaataacatgtcacattttaatctgaatataaaaaagacataaaacaaataacaacttcaatttatttataaaaataatatagaataacataaaaagaatattacaaaattataattttttaaaattttgaatccatttagtcattggtcaactatcattgcacctttggaagactatattatcttagaatatatgtttgatctaatttaatcccaaaaactagttcataagtaaaagatgtctctcacttatatattttatcttagtcttatttgtagccggtgtgaaacctagatttttttttcttttcaatatacctcctcagacaatcacgtccaaatatttatttttgggcttgatgcgtggatattatggtggatgatgcttttaatggatataggataagtttttataccatattacatttttatcatttgtctcttgactgaacctgaatgcaaacactccccacaacagattcctagcttggttctcaaaaattaacctatcgcgagcacaccacgcattccaaataactatcgagatgattatcccgtgctgataaaccttcctccttaaccaacccaacaaggacgtatcccccatccctccttgaagaatatccaacccagacccagcagacctgacccaaaacaatgaacaatcgtttcctggacaccttcacacctagggcataaagacgacacgttaatgcctctcccagtaagcacctcaagaaaaactgaacattcgcctgaagggggagcttccaaatccaactccaaagctcattctccatattctcagtaagaccattaagtcagctataagcatacttcgttgtatacaagccctacgtattccagttccatatccaaacatcaggcatgcttggaacaaacttggggcacaaggttaggatattctgcttaacatcatcaggaagcaaagtgtaattaaagcttctccaacctccaaccatcttcctcccaaaggtcttggactgtataccccacatcatgaatatccacccaaggcacctaagtagccatcggttccttaagaacccaagagtcatacaaaatatccagactctctctcccatcttgatagagaacccttcatccaaacaatccatagctttagtgatcgagttccatgtcagagagcccttcttatgtctagtcgagaaaaattgatctttaattgaatcatataatcttattactagaatttttattaaaatatcctttttgtacatcatgtatttatttattcatgaaatttaaactctattgtagtttaatagatacaaaatttgtttttattaaatttgtaagatgataaataataagtttacagtcaaacgatttactacatatcttaaaactatgtaatcttattaataaaaatggtattaaaactatgtaatcttattaataaaaatggtagtatatcatatcataataaaatttatcaactaaaaagtgacactaattataaatttgggctccttatcttgtttcaatttataatttttgtctttctattttttacaaattcacactttaagtccaattcttaattttgtttatattttttattttttatattttaatttattaaattatttttatgatattttaaatgaatatattaagtctaattttaatagaacaaaaaatacctatgcaaaattaaaaattagacaaaagttataaattttttaaaataaaatagaaaaacaaaaacacttattatttgggaacctaaggcaaccacctcaccgacagtatcaaaaagagatcatttggattttgtgaaagtgacttgtaacctttgaatgaacttttctacctatttaataaattgatttcattttggacaaattggaaacgatgttaaatatctagaaagaaacttaatggtctgtctgataggaaaaaaagtgagagaacaaaaaaatatgacttataaagtatttttttttctgtttgattggaaaaaaataaaagaaaatttgaattttaaaaaaattaaaatttttcttcttttcaattcaaatttcaatttttttttcttattttattttcatccaaccaaatggacaataaatgatcaagttagatcaattatgctttcatgggttatttattaaacgaaataaacaatatcatgtgtagatttttaaagtattttaattaaattaagcataaagtaattacctctgcattagttaaatacattttctatcattaccttaaattaattaaaaattataaaatcctataagtctcacttctcatttcataagttttacatgcaatttattaagggaagtatattattaaattaggattttaaaaaacttcttttagcataaaaaattctttgggctttaaaagaatttgtgagaatataacaagttttaaaaaaatttagaagacttttatgatttaagttttataatttaaattttaacggatttgtaaaatataaattcataaaattgagaagaactttatggatttataaaagtttaaagaattccaagaattttagaaaacatttaaaattataaaagtctataaaaaataatacataatatgtaaattctttttttactcataaaaatttaacgaacctttatatccttaattttttcatgaaaaaaaaaatagtgagtcacgtgaactttttttatatcttattcgattcaacttttgaatacaataaatcttattcaattaacaattgaaactaataaatcaggttttgttattgcaagtttttttttacaacaaatgataattttttaaaggcaaaataaaatatagtactagctatcaaaacaaaacatccacaagtcatgaggaaatgcacactccaaattcttggttgagttctgagtttatacaataactactttcatgaacaagttttaatagataagataaattttaaatagttccatttgtcattgttcaaaatgaagttattccttatcaaccaaattccctaacatgttgtatgccagcgtacctttctggtgttgaagcaaactcccatctgagtatacaattaaaaatgattgtatttgtattaataatgaaaaattgaataaaccacaaggagtaccataaacaactacatatatagagtccccatgggttaaaatgtctacatgtccataataataacaaatgattgtatttatattttaataattaatgaaaagttgttacacagaagcaagaggagaagcaatttgtacacaataatgataaattaacatgtgattattgaaaattatcaagatattgaaggttatgaagtattatacatgaatacttatattgttaagaaagagaaaatgaattatgagtaaccagagaaaaaaaaactccaagaaagtctcaagattctattttgtgggattatttgatgtatatgtttttattgaaaagtcacatgaaatccaataaaatctatattaaaaaagaatccatcaaaatctttatattttttttaataccaaatgatttttttaaagttataaaaaatcttaattaaatatcattagattttattctatttctaaaaagttataattaaataccacaaaacttatttatcacatttgaaaatcatgattgaatacctcaaaatcctaattcaatataccctataagaatatgatatagaatacgttgctagcacccatatttttaggttacaaaaagctttaattggttgttgttgggttacagaatgatggaaatgaaaaactacaggacacaaggaagaaaataaatacattgaaattaagaattgatgagcggtgaattatatatatatatatatatatatatatatatatatatatatatatatatatatatatatatatatatatatatacccatgtggaaaccatgaatttgaattgtccttttagtcccaaccgtgtgaaggatgtcatggaacataatgtgttatttaagcatttcttataccattaattaattagggttagcgaaatgactaatttaattgatacaatttacattttcaacaattaattattttgacattctaatagtttgggagtcaaattcacattaggttgcaatttttaaaactaaaataattcactcttttttattgttggatgaattatatattaaatatataatatgtcaatactttattcttgcttaattatataatttttttctcaatcaagattaatgtatgattttactcccttcatgatttgtttactcaattcctcattttattttaatgagcaaattacatcgactttccttgtatttaaattttattacactcacactcctttcattaaaatatatttcttttaaaatgtatttggatgagagaatcaaaattatgagaaaattttaaattctaagaattttaaatatttcaattgaaattcttttatttttaaaattttgtgtttggataaaaaaaattaaagttatgaggttaaaaaaatgaatgaaaaaagaagaaaaaatatgattcgtgtgctaattatacgtgttcgtctacacttacactgattgatgttccacgagctcagacggtgtttcttggaaaagactgtaggaagagaatttcaatttctcatgaagttgaaatttcataattttagttatttaaaattctattttaaaatttcaaaattttaaattcttaaaaaaaacatccaaacaatgaattttatattgcagaaattcaaattctctaataaattattttcttcagttaaaattttctatccaaatgcacttttactaaagttattaagttttgagcaaaatatccaaaaaaatccttccacttaaccttcatgctttgcctcttcatcttcatcctgatcctctttacccaacttcatccataaccaggaccaccacactttgtgtcgcactttgtccccaaccaccactcaccgcacagcctcacctccacaacccactcacctcaccgctccccaactaccactactcaacacttcaggtgttcttgaacctatttgttgaaagcaaaaatatcaaattgtgtccatgaagaagataagggcatttttggctaaaattttcattaaattgcatgtgcaagacacatgatgtcctggagttaatggggccaaggggtgtctgcaatgaatttttcacaacgaagtgagtttatgtaaggttccaaaaatgatagagcatgagtgtaataagtcctaaatgcatgagacaagtgtaacttgctctattttaattggctctaataaatttgagttacttcttctttacctgcaaccctcaaatccttagttttttactgatcaaatgacaagagatctaaataattttaaattatattaatttaaaaggttgatgaccgattaaatttaagcaagattttaaggtgtagggttaaggttttaaagaagaaatttttagattttgagtaaaatctgatttttttttatgagtgatttttgagtaggaaagggtataaagtaatttaatgccacattagtcatagagaaaaaaaaatcctttatttaataaaatatttttaaagtaataaaaatgatatactagtaacattcatctagtgattaattaattatttttgactatttcttaagatttgagttaaacttaatttacctctacaaaaatcagcttgtgagttatgtaagaatgcaatcaaaagaggtggtcataatacaaaaatatcttattaaaatgttaatcttttagaataaactgaatctattcatacttactaaggttttttttttttttggtaacaaattcatactactacttactaaatgtttggaactatattacaaacaaaacatcagaagaatgtccctatcaaacacttccaattccaagaagtaatccattagctaatattgtcggttggttagattggatgatgcaagcaactagaaactggcaaagaactgggagcagcccagaatttcagaccaaggagcaccaacgttacacttcccatcacaaaaaccacaaattcaacgtatgaacataggggccgtttgctacaagaaatttttagtttttcaagttgggaacgatagtctcttatatttgatttagaattgtttgacttgagacaaataaaataaaataattgtcattaaataaacttaattaaatacaatgttgattattttattttgtaaaatttgtaattttggttatcattttttaaaatataaatatttggttcatgttttaaaaaataagtaactttgatctaattatctttaattttgtctatatttatttttttatttcttacactataattaattaaattatttcttgatgttaatttaattgaatatgttaggtttatggttaattacattaattctatataattaccaacatggtgattgataaaatcttatcttttaaacatatactaaaaaattcggtcctggattcatacgaacagaaaaaatatatatcgaaaccttaaataaatgtcgctaactaaaaaagtagtcattcacttctgattaagaaatattctgcatttttttttaaaaaatagtgctaaagaaatgatgaagacatagtgtgagaatgacattaattaatgaaaattgtatatagttgatgcatttcaattatgtgcaataatttaatatatattcataaatatataaatttgtgcattgtacaaatatttaatattttaaaacaaagacgtgccacatgcatgtccattaaattaatgagaatgtaccttttaactatccgtataaaatgtcagacaaaaaaaaaaacagtccctataaaaaagatttgagtgttcataaaaaaaatgagtacaattagtaaagtttatttgggtattcttgttattatgatattcatataaaataatactcaacgaaattcttctttttttattcatataaaatttatattgacaatttatttttataactgtaatttctgaaaaagaaaccagttattttaattgaatgacataagtaatttttgtaattagaaaactttccttttcttacctaccattagagcgttataattctaaagtaattaatacacatgaagtgattaacatagagggaaagaagtttgtggaaatgaattaggaaattccatgacatgatgtgtttcagtaacaacagtatagcatcaacgtgggggatggaagccccgtgcacaaggttgtcgacggtgggtgagccacgactgtagcattcatacgcagccgacgtggcacgatccgccaccatatatatgtctccatcactgggccccacccctgcgactcgcttttgcagttctataaattcctttacactcctttaagcctttttacacttcaacaaaaaaattacaaagcacgagggtctcgtttagcaacttgtaaaggacacaacagcatcacttacataacatgcacttccccttctccaccgcattctgtgttctctagtcaatagaaagtgagcactgaatttgctttgtgccgttcctgttttcttataatttgtgcatttttttgcacataaacaaaacccatgggaagggctccttgttgtgagaaagtgggattgaagaaggggaggtggacagcagaggaggatgagatcttggcaaaatacattcaggccaatggggaaggttcttggaggtcattgcctaaaaatgcaggtatttaataatgtttttttttttttcatccgcaaatatatgttttgttagtaagattttaactcacaatctttttcttcttttcttttcccttcaccatcgaactcgcttgtgttgtatttccaattgctaatatttttttattactattactattaattaaccgaactgtttcttggttactttgggggaccattttctgttttcacgttaagtttgaacttccgacaagaaattaattttgttgctactatatgcatgggagtatttattgtggaagaagtaatttgtgttattgatcaattggtattttttttttctgactggcattttggggtttggaaggattattaaggtgtgggaagagttgcaggctgagatggattaactatttgagagctgaccttaaaagaggaaacatttctgctgaagaggaaaataccattgttaagttgcacgcttcttttggtaacaggttagtgccagtggcatattgaaaactatactccagaatttcaaatctcgtctatttactatggatcacattcataaaactttttaagtaaacaaattgaaaggagcatgtactgcagtgttcagcaactttcttttagacacttttaaaacaacaaatgatttgtttttttggtacaatttaatttaaactgccgttgtacaaaattcgatgctaagtactgcaattcagatgatgtctttatccgtaattacaaattactcccatttaccaattatagaaatagagacatcaacccaatatccataactagtttaaaacaagagaaaatagtgttgggcatgctaaaaaaatcgttggcttgttagaaaaaaggaaaagtatgtacatataaaatgacaaaaattctgaatatatatatatatatatatatatatatatatatatatatataaaatatctttttaatatataaaaaactttctttcattttctcttctctcaatttggagaaaaagaaaaatataaggaccctactttaattagagtatgagatgtaaaaagcgattgaaattaattgtttcttacttgcacacttgttaagctatcatgcaaaatatatatgttaggtgtgtgtaaatcaaacgtggttcaaatcactttacgtcattagtcctaaatcgaaattaaagacagataattgattgaggacaatcgaaaatgttggataaatgtttatagcataaattaaaggaacatataaagaaatctatgcataaaaatattaaattttgaataaaaaaatttaaataaaaaacttttacacttactttcatttggcttttttgaaagtatattttttatttgaaaaatgctaaaagtacgaaactcctgcactaaggctgcatgtcatttttttggaaattcttacatcctctctctcattttttttatcataccgtaatttttgtgaaagcatttgattggttaaaaatattttgtaacacttcgtctcatactatttagcacttctctttttatttaagagtttgtcgatatttatattctttgaatagttttctcatttctttttactggaatatttaacgttgttgtcttattaatagagttttaaatcatgattggatatattgtcgtacgttgagcgtttgtgaatcatgtcttggcttttgacttttgtttctcttgaaaattagtatataaactcatgttttagaactccaacaaaacatatatttgttgtttgtttttataaagaaaaaagatcatatttattagaaaaaaaatatcacttatattaactaaaggtttaatatattgttctctcatttaaaataactttttaaaaaatttaatttaagtttcgtttattgttgcatcgaccctaatcagtttcactacaagaaaaattaatattagtgataaatcaatttatatataaattttaagacttttcactcaaatttctgtgatgccaatattagtgactaaaaaacaatttttgttactaataatttgatttttcttgttgtgtctttaagttttttataaatcaaaactttgtttgacattaataattaataatatttgattacttttatagtttgtagtattttttggtacgttattttaagcagcagtcttcaatgctaatttctattttttaatattttatttctgttttatgcttaaaacatttattattattatttctttacataaagtaaggttttttttttctcttcttcctctcgtcaatgattggtacttcatattagtgtgacaagtaaatcacattaataccgtagtattttttaattgtgccattttttctaatatttacatctttttatttttatttttgacccaagatattatgaacataatatgatatcgataagtccgacgtaacataaaaatagagattagtgattgcgtgtatgtttataagagattaaatgacatgaataaattatcctcctttaatgtctggtagaaagataataggagagttttaagagattagtgattgcgtgtatgtttataagagattaattgaccataaaagataataggagggtttttaggaagatatagtagaaagatttaacattacttataaaatcgcttgaatttattatataaacaatacgactcataacaatgataacacccaccgtgtatacatgaatttagttatcgagtaaaaaattaatttggtactcctttcttgattcaaatagattaatttatattgtatattatatataatggtaattatactgattttcattggttcgagtaaactgaaatttcttgcttacataagttcgaatgtagtgtgtgtgggaaaaaatgaggttgaaaataaacaattcattttttagattcctggaaatatattagtattggattgaaaatactcttagcaatcaaatcatatgcataaaaaaattgaatttctttaatattaaattattaattgtatattcttctttttaaaaaatgttgtacaattaacactaataaaatgacgaagtatgtggcttttgttgattataggtggtctttgatagcaaatcacttaccaggaagaacagacaacgagataaaaaactactggaattctcacctcagcaggaaaatttacagtttcccaggtgcaggtgcaggtgcaagtgcagggatcatggatacacctaaggtagtatatattcctcccaagcgcaaatgtggtagaacaagtcgttgggccatgaagaaaaacaaaacatacacccaaaaagtcaatgataggattaaccagagacacacacaaattggtttccctcaacagaacagtgacaccgcagttccgacgccaccaactccgtctctagagagtgagggtttgtcaaacgccgttaatgacttcaaggtcctggacggtgacgtggcagagtttgatgagccgagaacggaggagctggaggcggaggtaaataaacgtgacaatagcgttggaggcgtggaagaaagtagtaataccgatgaagacatcttgggactgtgtgaactagagggcattaatgaggacagtgggatgttgttgggttttagtgacattttggaaagttgccttgcggaaacaacatgtggggtttgggacataagtgaagagagagaaagcaatgacgtggtggcggctgatgcttgtcgcgacaaaatagcatcgagtgaggaagggtcatgctcttccatgaatcaagactgggactgggagagcgtgttagagtttagtaacgctgttgataattgggaggaccaagacaaattgctcacttggctgtgggaggacgatgactgcaagagattgggagagacagatactcagatactacaaaacgacatggttattgattggtttctctcttgattcatccaagaataaaataggcttagtgtgtgtgcccccttggtcatgtttctttaatctgttcttcttggattgattagggaatgtgtaaacttaataaatactttttttagttacttatataatcatccttaagacacactagttaggaatactcttttccttttactttaatttgcatgtcacatgattcgaaaatatcatgcagaagaattggaccagacattagtcactgtagcattcctaggttgtttgaaaatatggatcttattatatacgagttagagtttgatttttttataattaatttatagtacataaataaatatagaattttctgtgataatttttattctattaattgatttgaaattattgtaaacatgattcttaaaataattattataaattcaacataagaaatttaattatactatatttagacaacaatataacaaatctttgcgttatcaatatacagatccgtgtcagaaaaaattgagacttaaaaggcaaaaaatttagacaaagttgatgtaataataccattagttattaactttttatattaattttttaatctacacaatgttttataatcaaataattttaacatttcattctcaagacaaagttgatatcattctcgataataattttttgaattgcataattaatttatttgtttttgtgaaaaaattcaaatatgtgatttttattttttctagttaactttataattgaaagcatgtacataatttgtgttatatattttttggtttatcatgcttaatatattttcccaattttaagagaaaataaaatttttaaaaaatttcttaataaattttgtttaagaattcttttttagaataaaataaagtaatcctaacaaaattgtaaaaatatttattcgtgggttcgtcttctataaaattgtggtttcttgagttaataattccggtacatcgcaatttgtaaatgtaggtagttaggtagaggaggtgctagatctgtcaaagatattatgacaacacaaataatatatgagaaatgtaaatcatgtgacactctctttttaatatttttttttctgatggattgaaatttaataaaaattattagttttagtgagtaatattattcatttaataattttctctcctcatttagatatgaaatcatttaaaattaataattttaaaaactttcagtcaataaaaaaaatatttttaaaaaaatattgctatcattcctcagaatatatatgtcctgtgtctctggttaaggtattcggaataaggggtgctactatttctttaaaaccatggtcctcactatggtaatcatgagatactaatgtaaattggtgatctttgtttttgtcaaaataatgacggtttatatttttttttaaaaaaaattgtatgataccagtgcaaaaattggtccactgtatgtttttgtcatatgaatattaacaacattgtatcattcatgattattaactttagtatttgattatatttattcccgtaatgggttttgctagtggtatacatacactaggattttgcatggcttataaaaaaaggaaaatattttacatatctttcagttaataaacgatatgatatttttattaaaaaaattgtaggtttatacattttttggcttattaatcatagttgtgcaattttgatctttaaactatattattaattaaaatattacaaataaataataaaatattttttataatttagttaaaattataatttttttatattttctataatttgtaaaaataaatttaaatttattttttagaaaattatatgtaattttaatggagtggtaatttttttacttgaacataatttatagtatatattatcctcatctagtttgttatttgatgcacatcataagattaaaagtaaaatttataaaaataaaagggataaacatataaatatataatcaatgttgctcttaaataatcactcatttattgatttggaggacctgtgaaagtttctgcgcttgtaggttgtagcatttgtgtgagccttatgtgttgttgttttcctttcgatctgcgttgcaattcagtttaaagcacgggaccactgcacaaatgcaaactaaactatactataccttgaatattcccttattcaaatatttaatttcctgtgtgtgcttacatttttgccacgtacacagattattataaaaaataattatgaactcttcaattgcaatcgtgaataaaaaaatattcaaataattgttgacatggttagcaatatagctaacttaacggttgccttgagaatgttaatttctagacagagtgaatttggagtattttttaattcagagttaaagattaatcttgacatgtagaaaaatttaaatttgatagtttattatgatacatttttttttacttaacccttcgatacaaataagtaaaatatgattaataattatttttattaaaaattaaactcacgtgttactttaactttaatacattaattcaatcactttttattattgtaatacatttgaatttaggagcaacctttcccatcctttcttttttatatagtattttcatttacttttgactgttggatttttgaaatatttttattttctatttatttgtcatttttagagtttaaggtgatattcatctattaaaaaaatattattttctctcaaagtgtcattatttttttcactattgctattaatgtacataataataatttcattagtatcgggaaaaaaacatttgataattgaaattttaacaaatttaatctattttaacttttttattttagaattaggaagttgagcctcagattttttacgagttacctaatttaaagaattttgttttatgtgtgattcctaatatacttttaaatcaaaatctttcttattcatgtgaccagattctaatttatatatcatattctataaccttaatttattatacttttattttgaatattcattatttaattatatcccattttaatttgcctaacttggacctaagttcctttttgggtatgcatctcccaagcccattcttgaatgtctccgcttggtctatgttaataggcaaagtgttgcttcttgcacctgtaatatataattaaatattatagttaacaacgaatcaaatcaaattgaatcaaataatatgtataaaaaaaattgaatcaaataataatactaatgaagaattgaatgtaattttaaattttgtgattaaatattgtagatgcaaataaattctaaatgcatgtaaataaagcatgatattatttttttatcaaatattaattattaaaaaagttaaggtattaaaaaccattaattataaaaaaaaatcaaggtataaaataaagttattaagttaattataaattaatgataaaccattaattatttaaaaaaacttttatcaaatattaattattaaaccttaatgtattctcaatcttagtcgcaacccgaactctcaatccctcaatcccaatcaacctttcttccattcgacctattggagccatgcgtgcttgagctgaagcaatataactcgagtcagttcacgactcttggggacattgatggtgatcatatgaagatggaggagtctcaagcccttggaattatcgccagcaatgatttcttccttggcgtgtggaagtagggggtatagagacataaaaaccagtctttctcttctttaccttccattttcccttttttttttacaagttgttgtgattgtgatttatttgtagcctatactgtaggaaactgctccctgaagtacaacaaagtcgaaataattgttgttaccataaattgttatcagaaattgaggaaaaaaggggttggtggctgagattaaggaaaagaggttaggattcaataatctttaataattttttttaaaatggttaatgatttttaattaatttataattatttgtagtaatctaattggttaaccaaaataatgaatttttaaaattaggaaaatcaactgtgttaattaaatgtcagaagagtcaaaattgtgagtttagagaactaaaattgcgggtgagtttggttaaactttttattagaaaaaaatcacttattttataaaaaaaatgcttattataaaattttagatgtttatataaatttatttaaaaaaaacaaaagctaaaaataagctaaaaccagttttgtccaaatagtttatccaaataaatcggtgcggaagcagattttgtccaaaacatgaaaatctccttaataattttttttgacaaaaatatccttctttttaacatacgatcctcttcttccccctgcaacacttatttcctcagcaccagtctccttcccaatgcacgtgagttcataattttgtatttcgattttaatttgtgcctaattgttgtgttggttaattagaatgaagtgcaagatcagaccatcaatcaactttttttaaatggcttactaggagttaaagagaatactcaccatctccaaagacaagatacaaaagcttgttatgcccttctctttgtcaaaggattcaacaagaagtagaaacatcaataacttctagccttccaggtgataacacacaacattaaaattagaggaaatgggatagcagtacgtctcatctccagtatcgtgcttaaaatgatattcatcaagtcatctgtaatttcaagttaaaaaaatgataaatttaaacaaaaaatgctatcaaagatcaattgccaagtcgagtgtacattaatttttgttaagtctttattttttgaaataagtttgacttttcaattttgataaattgtttctacaagtaatcggagtatttatttaacatattaatggataaagtacttgtagaaaaaatataataaatatttttaatatacacattattgattttctgtgaattaatttttaaaataaaattataataataaatgttattaataaactctagtgtaagttcatgtgtagaaccaatactaatgaccaaaatttgaaaacattttattaataaaatactataataacatgactgttaggtttaaaaaaataatatttggaattattatttatctattattcatatttgaatatcgtttttagttaaaaaatagacatatgatgcatgtataaaaaaagtgatttttactatacatgtttatttcgtaagtgcttacaagtcttttatttaattttggaataaaagaacatttatttacttcacatactcaaacaagttaccaatcacttttaattaaaaaaaatacctttttttataattgtaaccaaacataaatgagaattaagcttttgtaaaatcacttataaataaataatttattttaagcctaaacaaagtcaccttacatgttagtcaaaaaaaaaaaatgcactgtgctgcattacattatgtgtattagtgtatatacatacgtagatttgttcgagtacaacacgccctttacacgttgctttgatactctggctattgacactgtgttcctctcatcggttgccatgtcaacaacgaggcgtcataggtaagaagctagtatgacgtggtagcaccgcgagaaatgcataggccaacgatgactttaacgacaagcgatgcaataaaacgaagccacgtgaccgaaacggaggaacgaaaactctacaccgaaacaggtttcctataaaatcccgcatgtgccgtagcagttgagctgaaaccgagaagaagaagatggagatgtatcagatctggagcaggagaatagcgttgggagcgttcgcgtttgttctgcttttcctatcggcctcagcagacgacgtcgttgtgctctctgaagataacttcgagaaggaagttggtcaggacagaggagctctcgttgagttctatgctccttggtaacttaccaatcttctcgatctctttctctctgtttctatcaactatttcttattccatcgttactttgattttttgaaatcgttatcaggtagggtttattattaaccgattctgatgtttttcctttctagttttattccgatcgatcgcatgtgttctttgcgtttaacacttcaacttgtcgttttaccttctgttgatttgtacttaatgacttcttgttgtagacgatacaatacgatgccgtttttttacttttggtgcaatttagttcgtctagattttgtttactagggtagtttaatgtcactagtttagtttgtccctctcatcatgaacttatttttgtaattaataaattaaattaaaactattattgttctttatttaatttttaatgtattgcgggttgactataatctttgattccttttatcaaataattagagaataatatccctctaattaaagtaaagggactaaaaggtacaattaagcttactataatttgtgagaattaaactgtcatcctctttatcgttgacattgagagttgtaaagaaacacaaagacataacaatagaaacttttggtatccgtttggcacgtcaagttgcaattgtagtttaaaattgtaaattcaattccaatcttgtcataattgaaactggttcattgtcataattcttatgtttgggttatgcaaaaaattagagcatataattatagttgagtccattttcattttggcacctttgagtaagggtagtcattggtggggtaatgtcggctttgagtgggaaagaagaaaagatccataggtggtagtcacgatggtggtggtagtcacgatggtggtggtagtaccgtggtagtggcggtgaggtgagtggtgacaatgaggtgaggatggcagtagaggtgctgggatggaagcaggaggaacaaaaacaaggagagctattgcaacttcgagagtgaagttatgaattgtgattcaaagggtaaggattagaagttgggaaggattaattttagttgtgttataattagaagttgggaagggttaattttagttgtgttataattccatggaattggtctttgaattgtggttccatttctaaaatgacttgcaaacatcataactaaaattctaattccaagcctcagttctatgcctaacccaatgtgcttccagaaaaaagaaaaggggtaaaacgggaaaacaactaactactattccttcaaacaagttaaacttcactcccaaacatcatatcatcaaaaactttatgagtagaaatccagtccaaaactccaaaacaaaagtcttgatcaatcattctgtgttccaaaatttcatgagcttaacctattcattgtagtaattactaagtaacttccttatattagtatgtacactaatatgtcattatgtttacgatcacttcctctttgttgtaataggtgtggacactgcaaaaagcttgctccagaatatgaaaagcttggtagcagcttcaagaaagccaaatctgttttaatcggcaaggtcagcaccttggtgtttctttcaaaatttcgaataatgttttacaatttttctgtttactttatattttttttgtggtattttttaagtttcaggcattctatgtatttatgattgtttgtgtactttattttattgataatccctctcttagtgtggtgtggagcatgttcatgttatatacctgccttcatgatgaagaagtttatgctacaactttaaaatttactatagcgcattcagatcatctttcccccgttgttgaactcttagttttcttcttacttaatgatatctcctccctccttcctatatcttaaactagctagggggggggggggggggggnnnnnnnnnnnnnnnnnnnnnnnnnnnnnnnnnnnnnnnnnnnnnnnnnnnnnnnnnnnnnnnnnnnnnnnnnnnnnnnnnnnnnnnnnnnnnnnnnnnnctttgtgaatgtactcagatttcttgtgcctgtatgtttttattatttccattttacctttctcagtgaggattcagtaatttcattacccattaaattgacagcttaatttttaatgtaatgtaggttgactgtgatgagcacaagagtttgtgcagcaaatatggagtctctgggtacccaacaattcagtggtttccaaaaggatctcttgaacccaaaaagtgaggagatttttgtctattggaatataacattgacacaattttatatcttaattcatagttatttacctgtcatttcacatttatcattccttttgcattcaatacttgattttggaaaattcccataggtatgaagggccacgcactgctgattcacttgctgagtttgtaaatacggaaggaggtactgcttgagcttttgaaaccttgtgctttaatttcttgaaggtgaaggcattgtgatattaacatgtttgtgtaacttctgagggaatgtattatcttgaattggacatatcagaaattagccatcttgcaccagcttttgaaaaaaaggaaaaatattttatgtaggaaagatgttaccaagccactaaactttttggtttcattcatatcttacatgaacatcactgtctacacactttccgagtttccctataatttttagttatggtgatgttgaggataggcatcaatacaatttggttttccctttgtcttctattatgtgcttttggcttgcaattttaatgggatttcctgactatgagatttgctcgcaggaacaaatgtgaagattgctacagctccttccaatgtagtggtgcttacatctgaaaattttaatgaggttgtcttagatgaaaccaaagatgtcttggttgagttttatgcaccctggtactgactaataattttcgtattgtttctatttttgtcttcaattcatgttgtggtttggactaaaatttggtaaaacttagttttacattacacactgagtattgtgaaaacactcatactgctagatctaataaattttgtgattctgctaggtgtggacattgcaaaagtcttgctcctgtaagtatatctttgaggatttcttgttatcactttaaggtcggggttgttaatttttgtaaaaccaataatgtgaaacctgactatgctctttttttccttcagacttacgagaaagttgccacagcatttaaattggaggaagatgtagtaattgcaaatctggatgctgataaatataaggatctggctgaaaagtgagttttatttacctgatatgaagtagttgtgtttgttctgagtgaatcaaactttacaggtgaaggccaggagaagtaaaattgtttttagaggccctagactgatagatgtccacgttgcatagtgcttattcatagttgtcttcttttcgagtcataatgtgatggaatatatgaatcattacctgttcagggactatatttctgtgtaattcagatatgggattttatagaatatagcaacaagacaaaataatataagaactgaaacagatgaatgtgttaatactgctaataaatgatactacataactaatgtgattacggtggttaagaaaacaaaaaatccagcgaagaggataaagatggaatattacaacatgataaataattgaagtttgctggaataatatttatgcaggtatgatgtgagtggatttcctaccttgaagttcttcccaaagggcaacaaagctggtgaagagtacggaggtggaagagacttggatgactttgtggcttttatcaatgagaaatctggaacaagtcgagatgtaaaaggacaacttacttcccaagttagtgaaatgacatcaaagagaagctagagttttgttttattttattttgtggtcggggatgaaagttaaaattgttgcagttggtgtcttattcatacatttgatattttctgtacaggctggtatagtagaaagcttggatgtcttggttaaggagtttgtagctgccagcgatgaagagaagaaattcgtgtttacccgaatggaagaggaagttgagaagctgaagggttctgcctcaaggtaacttaaataaacatcatccttctagaacatttgcttttagttatgtcacttgagaatagtttaatttgcattgttgtgttgcatatgttctgcaatctttgcccaaaataagaaactagatgcggtaatctactaatccttttttttttatcattaggcacgggaagatttacttgaaagctgccaagaattacttggaaaaaggttctgattatgctaagaacgaaatccagcgcctacagcgcatacttgacaaggtaatattctctttcagtcgaagcaaaccttgaaagttttactcactcgtgaaataattatgaatattctttttttgtggtaaatttcaattatttggttgtaaagtgagattaagaattgaatgcataatcgtgctactcacttgcctatgttgattgattgattgatgcagtccattagtcctgccaaggccgacgagttaactctaaagaaaaatatcttgtcgacatatgcggcttgactttttggtgcatcattaaccatctctcatggaagctcgtgatcaatcgcagctcctgatgattgtttgactttgatatcgaaaatgctgggagatattcaacgtggatacttgtagtgcttaatttgagtctgtactattgaccttatcttgcatggcgcttttggggttaaaaattccgaacttacgattcttctccccattgtagtctacctgagcggtttaaaattttgggagacgatagcttttgtctttataccatgtgtttcgttcgttatttgatggtagccgtatatatatatatatatatatatatatatgctggaagaggcatgaaaatgatgtcatgtcataacttaacttattgataacaaaaatctagaacataatttttaatatatgaaggactaaaaataaaaattatattatattatatggacttaaaagttgtttaagcctataaattataagaaatgaacgcaataatcaactatctcgaatgaaaattataataaagtaaaattccggaggcacaggactgtacgcataatttactagagagcagctggaggaacaaaatcccataaacaagaccaagactaacacaagcaaccatctcgtactaggagacgctggatagtgatactgagacaattctccaatatagcaagttaaccttccaaacacattaagacctgcacggcgtaataccatgaccaaggttgaaatcggggttacggaatacccattgatgaactctcaatactctctctcgtcaaccagagatttcatatatgagcaagatctttcctcaggatctatgttaggagcagactcttggttagaaacaaaaggcaggtccaaagatgcagggccaggaggctgtgttctcatctgcacagatcttagaagtgcagctcttctcaagtcagctgagtggcatatatcacttggggatgatgggaagcggccttcagaatccgaccctcgctgacgaggctgggggcaagcaatggtggagccataagaggcatttgaacttgaagaaggtgctgaaggcaatgcattctgtggtctttggtacctgtgtggagaaactggactactgggaagactgtccggttgggatgagcaactgtgcacaggggtctcgcaaaaccttaggtcatctgaatcttctgacatcggtgaatattgtaaagacatatcatctctgaaaataaattcaacaaaaagaaatgcaattattggaaacatttgctaatcattggagaataaaactcatttattataacataagattgcttgcagttcaatgttggtgttaagggtgtttaaaaccaaattatactgttttaaaatgccaaattaatccaaaaaaataataaaaaaccataaaaccacctttttttttttaaattttggtttagtgcaattttcgcttcctattcttaaaatcaaaccgaatctcaggttaatacactttatattgcatcccttgttatacccccatataaaatttgattctttccttaaccctaccaagcactaagatactagtagtattttcaacatttgacatgataatatgtaatttcatgtgttggacatgttgattatgttaaattatgaatttatggcattaacggtatatcattctataaaaataaaatacgtagagttattatggaaagttgactctacatatatgttatttcatgtcttatacatatggaaagtagcaatttatcaaacatataggatatgaaacaacaaatacgtagagttagcaacattttttttatcatacatgtggatttttacgtgtgtatatatttaaacttatttacaatagattttgaatcatatcaagacagggaaatatgcttatggtaaatatactgaaagagaaatcaagcaacagctctatgaccaaagccacttcacagttgacacacagctggaatttcgccaaaattgccaaagaaatctattcaaaactctgcaaactagagctacttgcttgctcaatctgtctccccctcccccacaaaataaaaacagtcttgcatcactctcagatatatttgtatttttatttttttgaacctaagatccactggttgagtacctatttatcatgagatggggggtgggggggtaattagatatacatctgaatctaggccgcaccaacttttaccaatccaagaccagtaacagttgcaatggctagaaagtaattggttgtgaattctagttactactcctgctcgccattacttcatgtttgatatttcacatcaaatagtccacataatggtaaataagaagcacactagtgagttacattctacaaggttatgtttaaggggtatcaatcaagcgattaatattaccaaataagacatgacaatgtaaaccccaaaaaaccaaagatagagtttttcaggctagtggatatataataggtttgcatgagggaaaatgatgagtgaaagtgtcagtgttcatatgaccaatgactagacactaataaaggccttctacctacttcaggtttggagtttctttgcaaagaaaaccataatgaggaagattttagtaaatcctattttattctggaatagcaaagggatcatcgttctcaacacttgcacacatcaaaactacttgattttccaccaccaacccaccaaaaaaattaataaagcataatgtcatgcatcaatacaggtgaaaatagttttcagactctgcagctgcaattagagctaccaacagatctatctgtcatatctttcaatggctacaatcatgattttgagaaatttaacccaactctcacgtataaaggagaagaagaatcacaaaaagtaatgaggaagataaaaagagtataatttacacaagatttcaaaagccaacctacactgccaaaccaaaacatgcatattaattgtaataatgcaactggaaataactcattccatgagcatttagaatttagctcatacattggacgagttctattcaatatccaatggatattggatattggatattgaatagaacttgtgcaatgtatgagcaaatttctgtttcaatatctaaatgcagaaatgcaacaaaataaacctcatcctaggaaatatcagtttataaacctccaaaatgtgaacaatatttacacgagaaaagtgaccaagattttacctgaaagagaacatgctttcagaccttgctggagattccatgagattatcaggaagtgagtctccaactgtcaatccgttgagactggatgccattatctggggcacaggaacaatagattaagttactctaatttaatcatagttaatttcatttgattgcaacaaaagcatacatgaaaagaaaattgtaatatcacacggtatcaattcaatcaaagatctatatgatcaaagcaagcataagttctaacaaaaaaaaaatgcacctttagaaattgtgattcaactcagttatgcaaacaagtaatgcctaatttgcaaaaaggccctcaagccaagtccctcaagtttaaacaaaaaataccacttaataaaaaaggcaattattcataaaataaatcgagattcacaaacatgtattagctgatgaaaccaaaaaaaaaaaagttataaaagccgaaagacggaattcccatgacgggccatttcacaaaaacaattgcaaaatgattaaaaactctaacttatagaacaaacaaataaacaaaaacaattaagaaggtaggttacagttaaaacaataaaataaacaaagtaataataaaacgacaaaagagggggaaattagataatggtgtgtgtaacctcgcttaggtaacgcttgtgagagcgaagattgtcgagataaacttcctcttcgggatctctggtgcgcttggcactgggcgaagatgctgagggcgaccctcccaaattggaatcagaacccattgttgagaccaactcatctaaaccaaggctttctctttggtgaagaaaaagggactgctcaatgttgaaaccctaatttgttgtgcagagatggcttcggcttccctttccgtcttccgtcattggcagtgaaacacagcagtatcagagttagtttgctttttcggcctcagaaaaaacgatcagaggggagatgtaacatggtttcttcggcgttgtctatgatcgtagacccgcgccttgttcctgacacgtgttaccaaacagttttcttaaacaaaatctctgacacacattttactacatgaaaaaataaggaatctttgatttaactgttttctatttttatttttattgtaaataaaaaaattgtgattaaatgtattttgttggaattttaaaaatattttcagtaaaaatattttctaaaataaattaaaaattgaaagtatttttatttcttgaaaataaaaaataaaaaatcaaatcaaatatatattttcagaattttaatcttttgaatagattttaaaaaataaaaataaaaatacaaactaaacctaccctaatttaactaaatgtcattttgctgtttagtttttaaaactgctatgttgccaatcaattctaaaaaaactgtttttagaagagttaaagaaaaatctatttggcaattttgttttgaaaattattctagagatgagaaaataattgcacaattatgataacatgaaaactaaaaattgtttgttaaatttgtttttaaaaattattttcacaaataaaaaaaagaaaacttgtttgattgtattatttctttatgatttttaaacttattgcataacttatttatatgtatatacagggattaaattttttaaaaaaatttcctcaccgttaaagtctacaacaaagactttttttttttttttttctcgttggtggttattgcatcaggatgcgtaactccatcgtcgttgtcatttcattcgatactagagatgatgcgaggtgggcttgatggaatcggcgacggtgacgctagctatcaggggagatggaaagggtgagacgactggagaggatgcaaatggtgtagtggaacttaaggaagttagggtttagaggccaaaaaattggagacaaatcggagaagaagggactaaaataaattttttaaaagataaaaaattaaattaataaaaaactaaaaaatcatttagctaaagaaaatcaaaacataaaatttacccatttatttagaccaaccaaattaaaagctcaacttctttaaaagttttttttagttaattttgttcattttatttataatttaataataattatttttccaattaattttttcttgaaatgttttgaagtttatcaatttaatatttaataaatatttttaggtttgaaaatacgaaagttagaagataaatagaataaagaaaatttaaatgcaaaaaatagataactatgatttttaaataagaatattttttaaaagtaattatatgtacattttcagaaattatctgcaaatctctaatgtttcataaaacttgatcgatcataaaatcaaatttaaatttatttgatttacttaataaattaagttcgataattaaactcacgagaaggacagacaaccccaacaacaaaatatttgaataaagagggaggaaaatgcccttgggtgagaccacataacatattgaatatgattctcttgaggacgaataaagaaagggaaaagatgacaacaaagcaccttttccatctggtggggagaaaaagtactagtatatatatctgagaatgaatggtgatcaatcacaattctagttataaataaaagaaaaaaaaaaatgcttgaccaggctttttcctccaataagcagttagggttaggggtcttagtatacaaagggaatatcttgatcactcccattaaaaaatcattgtggggaaaaagaaaagaaggtaagcgaatcgccctaaagttatttcgtttgattcgttagaaattacattggcccatgaaagtaaaaggggtgcttatatttatatatatattttaattaattcattgaaaaaaacaaaataatgcttgctggagggcatgaaacaaaataaagtgaatattttcatgagtttcatgaaacaaaataatataaacaagtttcctacctttttatgggaagatgactttaacataataaccaaaaaaggtaagatgacttaacatagtaacaaaaaaagtagatgactttaaggcactaatcgactaaaattgacatgggtccttttattactagagatgtgcgataaataaatcaaagaaaaagaacccaaagaaataagtttaactgtttttaaaaaaaaaattccgtagagatttttcagttatggtttttatatgcaaattacaaaaaattttttttttctcaaagcataatttgattttttttttaaatcgtaacgctaaacatctatttttcatttattatatatagatatatatgaagcgtagatgacttttcaacgtttctcatatgtaaccaaaaaaaagagatgacttttcaacaacaataagaaagagagtagacgattagagtagtagaattaaagcataaaaaaagtagtaggattaaagcataaaaaaagtagtaggattaaaattaatagacacttctaatagtcctattaaatagaatgtcaacaacacgttgaaatagttcatatacatttactaaagaaaatattcaataagtctaaatcataggagtaaataattttactcaatttaagtgtaatagaatctcactaagatggctactcaccaaataaaatttggcactacaaaagaaattaaatccacgtatgtaaagaagaaatacctaaaaaaaaataaaaataaaagaagagagcgaaatgaatacatacaacaaatgaaaaaaaatcgaaagaagttatttttaagaaaagttaaatataataatataatcctaataaaacattaattttttactaataaaatattccttaaagtagaactgatcttcaacaaccatttaagtaagtaagatcttaaattcattaaaatatcattcaagaaagtaaaaaagaaaagtgaaataagaaaaaatatttgactttaaaataaggtataaaaatttaaatttcatcttattttattatttattagttttgttcttttttttttgcaaattaagtatttaagtgaaaatcgatagatgtagcataaaaaagcattaactttttattttatatataaaagaaatgattttgttaccacaaagagcaacatcatgtctgttgtgtactaaagctgcaagttggacagtagcaggcggaagctagaagtccaaaatcgaagaggttgagacttgcattgagaggagccttttttccccttaggtttttaaaattgcctttggaccttccttcccgctcgtttcacaatgaaatacgtgatcatcagcggcggagtggtcagtggcctcggcaagggcgtcaccgccagcagcataggcgtcgtgctcaaagcttgtggccttcgcgtcacttccatcaaaatcggttctctctttctctcaatttcttctctcttcttcctttttccctacaccgacttgcagtaactttcaactttcatgcagatccgtacttgaacatcgacgctggcaccatgtctcccttcgagcacggtgaggttttcgttctcgacgacggcggagaggttcgtttccttcttcccgtatttttattttttttagttatacctctgcatgctttaattttaacgttaccgaggtggcgccgaattgacttttatatattatattttgactcctcggtgataggttgatttggatttgggaaattacgagcgcttcctcgatgtcacgcttaccaaagataacaacatcaccactggaaaaatttaccaggtgcttgcttgcttttgcttcgctttgctttatgtctgtaatggatatggaatatggaactccctagtgaatagtaaaatagtgtgctggaaagtgattttgctctcgtggcttaaccgttgtgtttgttttcatttcatatgactagtctgttcttgagaaggaacgtaaaggcgattatctcgggaaaactgttcaggtgatataccgcacgtatgccatttacctcttgttgctagatatttattttattatgtgggactgtggataataaagactggtttgatgaggtattggtgttttaaagtaggtggtcccgcacatcactgatgctattaaagattggattgagtcggttgctgtgattcccgtggatggaaaggagggccctgcagatgtttgtgtgattgagctgggaggcactgtgggtaagatttttactcagggattatggctctgttgaagctgcattatccgcttcaatcaataatgtgaaaacgtacctgtctttctacaggtgatattgaatctatgccgtttattgaggctctacggcaattgtcctttcaagtaggtatgacaacataatattttgcttttaaactaacagtgatctgtatagttttgtcaaaatttatttatcactttagaatttctgttaattgccctctcatgtttgacgaggaaaccattttatatctttttttttaaattcccgtaatcaccctaatattgaaggtaagtaatatagataacaatctgagtatactcaagtagatatgagcttggccgtgctagatatcatctctatgcaaactgatcaatatggtggtagttcatttatgtatcatcagtaccgtatcgtgtcagcataattcattaatggagattgctgttgtggtattgcataattccttgctgtctgtttcaataaagttgttcattgatatttttttgtctgtcaattttttgtggatgttttttctgtcttggtgattaaatgttagcgagaatacaaatttttatgtttttattctcatgatttcttctcagggcctgataacttctgtctcatccatgttagcttgataccagtgttgggtgtagtgggcgagcaagtactacttaattacttgtggattactgtttcagacttagtttaaattgatttattttatttttctcattttgaatgcaatattctgcttccagaaaacaaagcctacacaacatagtgtcagggagctgcgagcattgggattgacacctcatcttttaacaagtcgctctgctgaggtatattgttctgccattttggcacctttgtgttataatgtttgctccagagtcttttggtaatagcagtgcataaaagatcttgctcgcttaatcttagcatgcacactgtactattcttttctttatttaagtcaagggagttattgatttatacttgtttccttctgttttaacttttcactgttgtatctttgatgctagctagtttggtcatattagcagctgaaatactctgttcttgaatatggcagcctcttctagaaagcactaaggaaaaactctcaaagttttgccatgttccagtaagttggtgaactgagctcagttgttgtctgacaaagttttgtttattagttattgatctatattttctgtattttttcacaggttgagaatattctgaacatccatgatgtaccaaacatttggcacattcccctgttactgagagtgggtctctaataaatttttggttcgtttgaagcttggcttcttttgtttgtattttgtgtaaatgttttctttatgattggccacttttttcagaaccaaaatgctcaccattcaattctgcatcagcttaacttactcaggtgagttcttgataaaggaaaatagaagaaaactctcaatttattatgtaatttgatcaattgataatgttacagtcttcaaactttgactggggcgaatcctaattaaaaaaaacacagccctttttttaaaaacaatttttaataaaataattatttatccttagaagtctaattgccgaaggcatcttgaaccaaaagtatttaaagggcataaatagaatttaaaataatgctgccatggtaccatgttacagtgcctgaagtcctgaacagtacttatgctacagctatctaaacagtaacacctgctctagaaattgcctttgaattattgatctaatctgagatgtgatctaattatggtgtgttaaaaagaatgctcaaaaaaacacggtagaattcctcaaagtcaacagtaattcaacagtaaattttaatttacctcatttgtttgccatctgttccccttggcttgaaaaacacttggtcttatggttttcaggctgatcttaaacttgtccaatcgttgtaaaaggatattttgaatatgtaaagatcttgaatttctttcctagcttgttatctatgtttctgagaaattgcaattaatatatgttggaatcttttagcggtttgaactaactaaatttttttgagcaaaatctgaatgcaacacatcaaacccatgcaatcaatatcctgaaagatctctggtcttcaaaataattgcatcaatttgaaagcattcattacataaccagttctaccaatttaggtaatgtcttgaatgaccaaatgagggtaactgtcttcactatgctcttcatctactaaaagatggatggacatgaatatccttttttcttcctcaataatttcagcttgcctatcttcttgaatgtcatctggttgtgcatcatggattggaggagaattccaatctacaatgtcttatcctctagacctccttccccattggctatagaattgggatcaccttttggtatcttcacgtgagctctgagttgatttctatacacgtttctacctcttgtgtaggcaactccatcattctttatatctatgttacctcttgagcttgggtaagcccaagaactcttgcactaagtgctaccataactgatatggattggacctagctctggtccaatgattttggacaaaatctgtgggatagaatctgcaatgctcaagatattgagagagaaagcatgagcagaagagatctaaaacatagaaaaactgttgtcttttagtttaacaagggaaagaaaacccatttactggaaaacttattgatattcttctcttctgtagccttcaaagtcaaaccccttgataaagtaatgctactacaataacatgaagtgtcaatactcaacagctgtcgcgcattagttgcatgaacagtacactgtaatcttatgaatgcttaaatgaccccccttgccatcctccttcataacttgagtgagacaatatatttcatcattctgaatattgtttatcatacttaggcatgctggacatattgtacttgtttcttttttctgaaaaatatagtgatactatgataatagtctacttcatttgtaaattctttttcagccaagctacacctcctgatttacagcagtggacagagatggctgagacctatgataatcttactgaatctgttagtatataatattagtttgcaatgctttttccgaatttattatattataattgtgcattagcatgaaaacactttgaaatttgcaggtgaggattgcaatggtgggaaagtatgtgggtctaacagattcatatttatctgttgtaaaggtgtgttgtatctttcttttaatgtttattactagaatagcaggatgacagtatattttatggaaattttgagtaatcatctccataaatctactgccattttcacgagcaatcatctgaatttcacttttttactaaatccttaaaacttctatttcctattgatagcatgctttatgttttatacaatgaaaagtataaacaaaaattttggagcatcaacccactttcattgtagcatggtggtttttttatttgacacatgattttttggcagtcatttgttgtaagtcactacaggtgttatattattgaaaggcactgcataattttatcatgtatttatttgttttttttatattttataatgcctgattgtttacaggctcttctgcatgcttgtgttgcacgctctttcaagccatcaattgactggattgcagcttctgaccttgaagatgacagtgcagaatcagtaatgttttctttcaaactgcatctgaaaaaaataggttacttgtcactttgaaggatgtcactcatgtaaggctaattttatttttgtggttttactcagacaccagaagcacatgctgcggcctggaagactttgaaggtaagacttggctttttagataatgtgatgtgatcctgctagattttagttcaggaaaaaatgacatgttttctgtgtttattatctatggaggaactgttggcttggcctatctttgaaattggattcatacagtgtaaggaaatgtgttgcttttgaatttgtaaccacggccatttttgtgaaattgaaacttgcagagtgcagcttgtgttttggttcctgggggatttggagatcgtggtgtgagaggtatgatgctagctgccaaatatgcaagagaaaacaatattccttacctggggatttgcctgggaatgcaaatttctgtaattgagtttgctagatcagtaagtaacatttctgtttgtcatgcttggttcttctaactacatgcttttattattgtaatttaacatttattattaggttttgggttgggaaagagcaaacagtgtagagtttgatgcccaaacaccaaatcctgttgtgattttcatgccagaggtatgtaaatgtcctacttcctcccccttttccctattctattttttgtttgcttgtaatgtctctttgtcataaacagggttcacggacacatatgggaagtaccatgaggcttggatctcggagaacactcttacagacatctaattgtatcacttccaagctgtatgtgatgtagctatctcactaggtggtattttaatggtgaatgaaataataaaaagcaggtcatgtatccctctagtgaaatagcccatcttccctccctcccccaataacgaggtctggtggttcatcaagtactgaagtgcttgataatcaggggatggcttgatgtcaataaaaattaggaccggttcagaattttctttgcaatatcctaatatcaaagggctttgggattcaattctacagttttaccttcaatgtagatgtaaggtttccaggggagtggtagctcattttatagccttctgctcaaacctacaatctcccatctcccgacaagaaaaataggatttaaagcacattcctgatggactataacttgtttcgaatatcttgcaggaatatggatctgaaataatgaactgtgttgtggaaaattttaataaacttctaatatgtccccatttcatgttcctaattgctaggtacggcaattcagagtatgtggatgaacggcatcggcatagatacgaggtttggttgtgaacatatcctttttggtgactgcatgatctgttttggagattggtggttatgtaatttgacattgacattatgcaggtaaatccagatgttattggaactttagaggaagctggactaaaatttgttgggaaggatgaaagtggaaaacgaatggaggtaagtttttagcttgggtaatgttgcaatgcaaagtaatattaacttagttagaaccaaggttgagaatctcagtttcaattggatgtggttgcatttgttatcctgcttttgtgtttctactttctatatattattgttacacagaattcacttcttttatcacttgtttcctgcatgggcactgcatctattttctggatgtttagaaattcttcttgtgcagatcttagagcttccaagtcatccattctatgtaggtgcacaattccatccagaattcaaatcacggccagcgagaccatctgctttgtttttaggtacttgcgagtagcgactccctaattttccttttatatgctatgaatcatatgaaagaatgaatcaaaaatcatttacaacatctgtgttgagttagtagtttgtgtgatatggggacagtctgtttggacctttacaagcacgcatgttacttgtggttacttatcttcctaaaggctttcttaagtttaaatacgtgttgcaatttccatgtgtattgatacttgaaatttcttattaaaagatttctcatttcaaataactcttaatcatcatcttcaattcctgttttcgttatgtctacctttttatgatgctgcatgtaggtctcatattggccgcaacaggaaagttggaagcgtatattagtaggcagaatggaagttgatctacgatttgttactagaaggctcactcctacaatatttttctagggtaaactggtactccaaagggaagataattggggagagggaagggagtgggaactgaaggaggagataaggagaatcatggaatattgtacgtgtgcagctgcccatgcttctctagcttggttgccgagtaatattagttgcacctccacattcattgttttatcatcagaaaacctcacattaaaattcttttatattcatttaatagtaagaagatgcttaaaggaggttgcaaatactagtatgtcttcacctgtgaccgataatgaaatcaagcatggcagctagaatagtaaaattgtagggctcaaaagcgtttatctttccttagcttatatctgcacgtcttggccacactgttaaataaatttggggtatggtcaaacatttcccggtgggtgtagcttaccgtgggcgtaataccatgtattttcaataagatttcattttcgttatcttttcgtgatgcttttcattttatgttcgcttgttaggttttatactttcttattcaacaattgtaagtaaaaccaaaaggtcatatacatgtgtccaagtttatcttgtacttgtgttctctatatgttctattattttggaaggtttgttaatgataagttttggaagggacgaaatagtttaaggataaaattataattatggattatgacatatgatggtaaattcgtacatgatattcaaattttgtcacaaattctgagaatctatgttatctgcattttccattttctatacatttatctatccgaagaaaaaaaaatatgatgacaaaatttaaggattagctctaaggatcaagcagtttttattttaaaaaaatcggtgccaagctaaaactccaattaatttggtatcattattctcatcacaattatatctctatttttgcaatcgactgtagtgttggtattcagatgaagaaatttcatctaatttctatatttcatcttttacgttgcataggattttgctattttcttctaggtggaagatattggtcgtggttagataaataatttaataaattattatcacaacagaatttgtattataaatctgggtatgaaatataatttaataaattattatcacaacagaattcaaataagttcacaaaaattctttcagatgttgtagacataggcattatgagtcacattcttttaaattaaacaatgaatagcagcccggtagacggtagtattttaattgaaattataactatgaaaatatgtaaatactagaactcaagggtagctcccggtatttacagcatccggcagtacatatggatctctctctctctcatttcgtgaactacaatgttttaccattgacaatggcatcaaaactcaatagaaaaagaagaaaaaagtgaacccgcacgttgcatatattagaagcatgctcaacaacttgtgtctgatctgggtgtttcattgtattctagtagagaaatctggcgctgcagcctcatttgctgatagaatttagcaatgaactcctcagcttgcttatctatcccctgtgcatctgcttgttgctcttcctcttcctcaccacaacccatcatctcttggcatccttcataataatcatgacaaaattcctggtctctgctgtctcctgcatccatgagggcactctttcttccagtatcatattcaacattgccatcatcattaaagtcatagtcaaaatcaacatgtggctttatgcaaggaatgtgcggcaagtggaagcgcatggaggttggacggtacatcttgacatggaatatgggggtcttgtcgaacgagagctcgcgctcaaagtagtgaatgtggcttggcggcggcgcagtgtggccgagtcgcttcaagtactttggtaccagacgcagctccatggcaaccctgcgccttaacaagccacctttacgtgcccacaacaatgacgcccgcaggaggctccatgctctatgaccaacgccacggttcttcaaacccatgatgttactatatatttgtggctgtcgctaaatgtaaatgccaagtgtgctttagataatgtagctgaaactcaaacgtgaggaggagtgtatgtgtatggtagagtagctattgcaagtaatatggaaactctttatgaatgtgcttaagctgatgatcaaagattttgggtgctctcttctatatatatgtatagagacctaagagagagagagattctggtcgggtagcgtgttagagaaagagacaaatgattactattagtttttgttttcactttcaagttaagtacacatcaaatgtgaaccaagggggggaactaactccctactcgttaaggacacggtgtacgcggttggaatcaagctgggacagactctacattatataatttgtttacttcattaccattctgccctttacccctatatatttttttcagacctattgacacatctttgttagaaaaatgtatgaatatttttagaatcaattaagatttaaatcttttaccacttggttaaaaaatataaacagcttcaacaattgattttctttactcttgtatgttatcattgatttaccaaccctacgtccctacctacaaaagtctataatattgaatattgattattgaagcaattaaaagcgtttacccgtaaatacgattatttaaaaagtcatcattttcatgatatgttaacacattgttagaatgatactgtaaaacagttcattactcgtgtgattatatgttaatgaacagagttgattctgatttctgaatatataattacttttttcatatacaagtaattgctatggagtgataagatttaaattttctcatagtattaggtttaataaattgttactgtaagtaagaactcttagattaaatattaataatactatgattttcattaatgtttccttttcacatgctgcagcaaaggtttcctaacctaaagttttttgtgtttttttttttggggagggggggacgggggttggggggaaaatgatttgatatggttgttgggagctttgcaactttacttaacagaaaaatggttggtaaggatgttttctacctcaaattttaataaaaagaaacatttctggaaagccactaataataacccattagtaagggtcattttggtcatatgaaatgacatgatacgcaaaaatagagagggggacccacagccacatgaaatggaggctgcttctagtcttctagttggattttgttggagtattctcttgaacgccgctgtgaatgctttcaaattgaactattgaagtcacagaacattataaatctatatttatatttgagacgcaaagcttacacactttctgcaagtaaacgtttgcttaatatggtatcttaatcaattaagctagcggatccaaagctccaacaactatttgttcgttgaaactttaattaggaactttctgttgcattgcgctcgcgcaattcattgtttacctactgtatttttttgttttctctccaacactttgatttgccccttttaaagttgtctaaaattaaatcacctatagcaaaaaaataaaaccatcctctaatttttaaattcatgacaacaacctttttttgtgcaactaacaaaattaattctagtccggaaacagcctctttgcatatgcaagggtaaggctgcgtataacattcctcccccataccttcgcataacgaagagcctccggataatggggtacgaagttttaacaaaattaattctagatgatttcgtattccttaagaagaaagagataactaattggcaatcatgcatatagcagacgttgaaatagagaagtcaacgaacacacagagctcataaaaaattatcatcatatacaagggtgattgaatgggtatagttgtgtacattaattcagccataacctgacttgcaaatcgcttcatcaccactactaatctgattccaataaataaatttctgtaggttttaggcaatagcattgatcgataaagtgtttttttttttatagataaattgaccgataaagtgtgggagccaaatgtcacataaccaaaattataatttgtggataaaaaatattcatgccaatgtcactcttctgggagggtaaagctagctacatatttatcaacagtgggtatatatctttcatttttttttttttgacagagggtatatatctttgattaaaatctcggaagtaatattattagactaatgatattcacacaaaaaattcttaatacgtcacaaacacttacaatcaccatttattaattagtctcttttctctctagctttctcgtttttattcttcttgaaaatcaactgctgccatttcatttctgtatgatcatatctgtatttgattttttttattcgtgtatttaaatgtgtgtgtatcagtagtttttcccatatatatcattaatatttggagggtcatatattattttttgtaggcatgacagttgcagctaagaccgaggaaggaatactaaaatttgtagaactatttattcataaagttatataataaaattctattgcatttagggaaaacggggatattttcttttttaaaagtggaaagcgattctggtttctagaaaaattaaatatccgcggaagtttttgtgaaaccttaatttgcttccaacaagacacgcagacaactaatgagagccccacaaaaaaaagtaggtctggaaatatcatttgttgttttgttttaagagtgttgctaggtgcacccagctttattgttggtacactcagctttatttgaaaatggtaaaattgttcctgttaattttttctcttatggatcaagttgatttataagttgatttttaagatttacggatcaagttgatttgtaagtcttaaaaatcaacttgattcgtaaaagacttatggatcaacgtaagtcttaaaaatcaacttacggatcaacttgatccgtaaaagacttacagatcaagttgatccataagttttaaaaattaacttacggatcaacttgatctataaggggtatttttatctttttgtggttagtgctgggtgcaccaataataatgctgatgcacctagccgcactcttgttttaatcattgaaagacccggcccgttccatctacaactgtgaaaattcaatatcatagtcataatatgtataataatgtccaatggttttgaagctagcagagtgccatactttcaaagtttccagctaattggagttgcgaatggggtaaggtggttgaatgaaacaaaacgccatagaaaaaccattcaattaattaagtactagctggcatgcatgatgcagctacatttttcttagtccaaggtcataaatcaattatgtccaaagctgtttttggataaaatcccatttgcggccgaaaaaaataataatttctggtataattgatttttgttttataactttttttttcattttcaaaattaattttaacaaaatataataattttactttgtgtagaattaattttgagaagtggagttttcattgaatacactgcatacgtttaaaatattgaattagttatgtttttagttctccaagatttaacaatttttcgtttttagtcctaaaataaagttgaattagtcttaatctccaataaatcattatgttctgactttaatctcttttgttagttttctctctcggaggttgatgggtcatccacaatgtgttgatttattattattttattatattttacggaggctcgtttcctagcgataaaaaaaccgttagaaaatgtttcaccaccgtctccaaatttccttctctccttttccaattcatgcacacatgaacccattcaacaaccaaacatatccatttcaaaattaaaaaaaacgaatattaaaagaaataacaaaacattggaaccatagtataacctaggcaaggttgctcttgattttgctatgttcaaatggtgaccttaatgaataaaaatgatatttattataaatctcactttaactagtgatacgatcaaaatataatataaatgtaaggtgtaaacctcactttagaaattgattttttaggattgtgttatacccatataatttacattataaattgatatccaaatttatcttaacaattattgttggatctatatattaagtcacaaattattgaatcattattagatcacttgcaaatgtttaatctaacaaattttaggctcaagatgtttaatcctcaacatgccaagtgtgtgttagagatctcacaataactaataataaaaaaaaatataatatatataagcaatatcagtccaagaataaaataattaaaacttaaaactttaagttcaccagtaaaaaaatatttgctattgatatttataaaataaaaaaaaagccacatacgaggttgagagaaatgttagatgtgttagcaaaaaagatccaacatatttaaagttaaaaaattccattaaaaatttcttaagggtaaattagattttaaatttattataatcttaataaatcctaatttgaatttaatttttaaattatgaatttttgcacatcatataaataaagatgatttaactaataaattattcttctcaattttacaattataatttttttttttcaatttattatcgtttgactgacatctttagcttagcttcgtgcattgaacactcagctcgacttagtgccttaagcatctccttctcgggtttgacaattagaggtttcatggttcttccaaactccatccaacattatcttgctcggaaaagacctcgcctccctgggtcgacattcaagcgacacatttacaaaatcatgtggtgaagtccaaaatacttcctgaacaattcctataattaataattaacagactattcattattaataataacagaaaaaaactgagatccagttcattaggtgcttttagtgtaattcttcgattagaagttgagtttcacatcgcaatctgctgccaaatctttaatgtaagtatttcttatgttgattactaaagtgaaacttttattctgattgaggaataatactaaaagtatctcagaaattctgtccaaaataaagacatctatcatttttctttaatttatttgtttgaaaacatactactattgagcatattcttttaatttgttccttttttaaaaggaaaactgtattttgtttttattttaaaaaagaaactaacaaggcaggagcttttctgtaactgcaaacaaatctgaacctgaatgcatcttatttgtcataataataataattcataacgttgtttttctagggtttattttctcgcaaaccaagttgtcgttggttgttaagagagagagagagagaggggaacagtgtatgttacgtttttggtcaactagagatcaagaccagttcaactaataaattataaaagcaacaaaaaataacggtaatagttatgttgtcccgaaacaaaaaaccttccttccttgacttcccccgaatcctttgccccaaaagccgccacacatgaaccttcccttctcttgtattgtgcactatctttccaatattagaattctccaaaacaataatgtccccacgtacataaaccaacgtgccaccgtgccactttcaaacccttttctttattataactacacaaccatacaacaagaatattgccgcgctggctcctttatttcgccttaaatttcttattagtgtatatttaaactttgctcgattgtttcctaaacttcgcacaacactcttctattttcccctctgctttgtagaaagcagaagggcgaaatatctcgttaatttagttaattaattcccttttcttctaaatagtccattatatacctctctctctctctcaacaacacatatcataatggaggcaaaggctgaaaactctatgatcgttagcattgaccaaaaagcaattattacccctcacgaagaacctaataataacatcactcgttcttccctcaagaagggtaagaggcagaagaacttcttcaaggtggcgctgttcatgatgcgagggcgttctcgtaaatccaaaatgctcgccgtggatgacgagtccaagagcatatggaggaagctggtggggtccatgaggccattgcacctacaaagcaaccaatctccatcgcatgatattgataataataataataataataacattcctcctcatcaatctaaaatgatgaagattacctcggcaccgtctgaaaacggcgacgatgggtttgattctgcatcggagttcacatactcgccgtctccggctagtagtcgttacgcctcagccgtggggctaaacgaaatggtgcaggaggaggaggaagaggttgcgaaggagaagattaataatgatgatggggatggggatgagatgattgatgccaaggctgaggagttcattgctcaattttaccatcaaatgaggttgcagagtttggatgtcacggatgatcattaccaagagataagcatgaggtcattaggcttatgagttatcaactatgatcagcttcatcgtgtgtcatgtcgtgcttccttcacctctaattatgcaaccctatgcatgcatatatggattcaacgaaatttaggtagaaatatacggggatttaaaaattacccttctcagcacatagaagaggtatatatgcatttatgattataaaaaaataaaaatacatacatgcatatataaagtgtagctttgatattaaaaaaattatcgttgagatatacttgagggaaggttgaacgatgacgaaaatgagttttcagctggctaagaaaaacatctgattgcagaagaaactcatggctattgcattgcttgaccttattgtgatgttagggagaagaatgaagttatatgtgacaactatttgttttcttctagcttttcaatgaattcattttggagaaattgccttgagtttttttttttacttcaattgagttcaatatatcaattgagtgaaacccagtagtaaagttgctcctgaacctcatgctaaatgtacgctagtcaactcacaaacatcgttgcataattcaaacctgtagtcaccaactcaccattcattaacatcacatacaccactcctagtctaatcaatatataatcacatttacctttaaatgttgaaatatagtggtaatgaaataaggtgttcaatcaaattcgaaatttctggcacaaaaactaaatgctagtagtataatttcatggatgccccttgataccacaatcaagcccaatgcatataaccacagaaaacaagccccaaattaaaaaaaacttgaaaggagaaaaaaaaatatgacgccgtgttaacaatttgggccagaggcacaggcccaaatgacaatgggtcggactagtatccatggacgatccgagaacacgtgtgcttgatccatcggatcccatcccggagcgtggccttaacctttccctcaaccgcgtaaacgttgtacttcgcaatcctctttctccgctttgactccgggtcaccgaaactccaaggcttcgccgccgtggctgccccgctgtgactcgcccgagtcacctcactcggaatcgccgccatgtagctctgactacagccgtagcttttcccgctcattatctcaacctgacgctgacccgacccgtaatccatggactctatgagtgatggttagtgacgaggaggagctttttcatgaaaagaaggcttaatgtttagggtttgaagaacgagttgaagtctgaaaatatgtgtttatatatatatatgcagtgaatcacgaaaacgtgtctttcggcgaggaatgtgcaatgtattggtctctcgcctgggaatctgggatggagcttttcctaaattaattaaaatatgtgttggttaattaatattcttaagatattgattaaaaattttaaaaaaatatttaatgtgaaaattataaaaagtgtaaaaataattataaatagtataactttttcatctttaaataaaagtatttttattttaaattctttaacaagtgttattagcatttgccttaaagtattaaaaaaataaatatggaacctctttttattatttttaaaaatagttggaagaattcagactttcagataaacgaatcaattttctaatgcttgtggaaaggggccttatgtttcctgcttctcatgataatacgctttgtaacgattgttttttaggacataacttaggttcagtttattaggtgttttattttagtaattcgaatgataaagattcacgttaaatgtttttaaagaatatgtgaaattttaagtgcacatgttatatttgttttagcattttatataaatcttcttgtattagagaaattttttattttctctacctgtggggtatattctgattattattgtatcttcttgtatcattaggttcaatataatttatattttttacaaagaatatgtgaaattttaaatttgattagagaaatgcaaagcacttataatttgtataaggtagggcaagttttgcgtagacagccaagatcgaggcactggaaagtggaaagtatgatgatgagatggaaatgggggatttcggatttggaggagaaaagaaagggataattaaaagctaacaatgaattgaatactgttttctttataagataaaactttgatctagttagagatggcgagaacatggagctgagtgcagactcaaagatgaaagtgagatatttacaaagatattcacactttaaagctggttaaaggaccaataaaagaataatataccaaacacatatttgtctgcttatagtgattgtatatgaaaaacatatatttataaaattctgataccaattatggcatctgaatataatcataatttaaatccttaaatgccaaatattctaaaataaggtgaatgagaaagaaattaaagagagaataactaagaagaattaacttagttgattaagtattggacgtaagtttttataatttttttaatatttatcttttattcctatggataaaaaaaagataaaaagtaaaataattttttaaattatttagtaagagagaaaataaaagcaaaaaatacatacgtagataaaatcacataaacatttctaattaagagatatgatacataaatatgagtaattttgtctttctatatttacacatacttttcattctttttcttctttttttaaaaaaaaattccattcctccttttctttctaaatcggagggaaggaatttttgtatgggaccaagttattcattttcttcttcctttttgtagttttcacttttcaaacaatggaaagattgaaaattatcatgtttttttgtccgttttcattccactcttggttaaattaaataaactatgtactcgaggatgaatctagttgatttaaggaaatgcttttattttcacatatcactctaaaagagaaaaaaaaattatatagtctcattcaattccaactcactatgtattacttttatgataagtactttagtagtcatattaacagtgaattataattggataatagtattacaccattaaattcattgtaaaattattatctatatttttcttctattttttaaatttatacacaaaatcataagacatgggttttttgtgttatctatataaatttctaaaaaaataagtaagatcttttatagctatttaaaaaggaccgtactacactattctcttaaaacacttattaattattatcaagactcaaataattataagttccacttaaaaattatttatacataggaattttttccaagtgatggaagggtgtgaggaaatgagtatcgaaaagatttttaagaatataggttattcaagatatgaaagagattgtagtaattctggaaggaacgtatcgaaagccaaaaacagattcatatgaatgagatgaagtaaaattgttaagtgtggattattcgaaggcatgtttgagtatcaattgtaaaagcgcttaaagggaaggcctgcatgacattctgacaacggttgaaagctgttattgaaaggtcgatggaccgagacaattgacaatatcttatataaaccatcttaggcaattatacacctgtcaaaagcttataattgaaatgttagtttagaaagtttataaataaaagaatcgaatagctttggtttaatataatttacattttttttcaaaaaaagaaccgagtagcttataattgtgtttcacgatgtatccattatttgttggtcgttccttttatggtgtgtacaagactgtttggtagattgctgggccacattgtacggctcaaacccaaaattagataacaataaaagtggcccattctaagtcagagtataaaagcccaagtggatgttgacaaagaaacgatgaagcagtatatgacctttcaataaaattcgtcttaatttgatttcagcagagagaagtgcacttttagactttcatttaatagtgtgtttggataacagcaagaatcaattctcctcctcaaatcatgatgatgtcatgaaaaaatagaagcacttatttattattttgtcttcaccatgaaaaaataattgattgtttcacatcatgaatctaatcaaagcacactagtttcagacttaaaagtagaaaaaaaatagttgagaagatgaaatgattcatacatttcattccatgatttcgatttaattaaataacacaaatgtgatgaagcaatgtaatcaaaactgcttaatgaattatgaatattacaataaaccatagataagcttaacggaagtgagaatgaagtatactaacaaatctgccatatgagaaacaaaggccccttgtttctctgcctccaacttccaaagtaatagtaatctttggtgcatttcagtttcagtccaaaaaagaaaatgaattacgctctcgtttcattaaaccggaatttgaataaatcttaactcttgaattcaagaaatccaatgaaacattgttagattgtaatttagaatggccatgtgtaagactatggcaatcgtctaaggctggagctgaccaagataagctctgtttcattgatggtaacgactcaataacgatgcaatatattacgtgatgtggggatcaattaatgagtttcaatttgaaggaattgatgatcaattattaaacagtcgaatacaagttggacggataatgtgacattttctcattacgatcactgacttgcagaaggcatactgaattctgaatagattggcatactttacgggcaatttttattgagaaatataagtaacacatcctcttaagcacattctttattatttgtcaaactttttgaaaattataaaaaaaaatttgagccttacttctcattcaactccactcgtgattttatagtttttactaaatttggactaataaagagaatattatagtgtattgcaagcactcaaatttatttcctgcggaaataatcaatgaattcactcttgctagagcatcttggcgtagacctttactgcattaagtctaaattccatttattcagcacttggtcgtgttgcaaagcaagagggaacggtatgcatggatgtttcttagacatcataatttaaataaaatatttctgctatgcgcaacagaatataagaattacaatgcatcatccaatttgcagtttctgttcggcaatctacatataaaaatggaacaaagagaaaactaataaatcatattccatctactagaagtagaagggtacatagtacatgcacatataggagcatgttttcaagctagttaattattatcttgtttgtcattggtagccgctgagaccttgctgagcctgcttggtgatatcttggcaacattacctatggcttttctgtgattagaatcattagaacagtaaactgctctgtatgccagagctcttccgaagtgccatttttcaagattgttttcagtggatgatggttgaataaaattgtctgaaatatcagcattgcctttctcagtagacattttttctgtttactgaaatatcagatggcactaccttatatatagtttggaaagagaagaaaccagaaacagaattattggggctggggcagattaattaattaattctttctttgatgcgtttttttaactttcggaaacgacaaggccagtgttaaagatgccaaaagaaagacatagggagctctttactacttgtaagactatttttatatcttgtcttcgattagaaggaacaagattggattatagcttttgtttgtttctttttatttggcttccacccccctccccacttctattggagtactaagtgattatagtatgattcaaaagagactaaaaatcatattcaattcaacaaagcctaaatcagaggtgtaaactacaaatgtcttatagtgtgtttggaagagccttgtaaaataagaaatcacatttagaagttattgttattaatttcttaatagacttgaaaaattatatcaataatgtgaaaccaaacacactattaaaaattattgttagtgtgtgatttgtcaaaagaatcacgttaaaatgttttgcatttaaaattgagtgattatttaatgaattttttcttcaaaaactagattagtcaattgaattgctttaggaatcaaatatttactctaataattattttgctacaggtttgcttaacaattttctaagagcacatggataagccatcatatatatctgagcaagtataactctgttaccagtccaaagcaaatattacatattctttaactctctaacacgagattagaaagagagacccttggagtcaaattttttggagagagttaggaagctctcataatttgaataaaaaaaaaaggatgggagaataaaaataaggtggactcacaaatttatttctccaaatagaaaagcaaaattaggaaactcttacttttttattccatttccaattataccctttcattttttatttgagcatgcatttttttttttaattttaagggtatacttttcctttaatagaaaacaccgttttctctcttcttactcttctctctaactaagaaaaatggaaaaaggaactgaacattttttttatattctcttctctggtttcttataccaaataatataaaggtttactaattttcttaccctttccccctttcttttcaacttttttttttctatttttactcttcattttttctatggccaaattaacctcttgtttggttggaaaaaaaaagaaaaaaagctgaccttaaataaaaaataatattgttgttatttatttttctggtgaattattataaatctccttatatttatctttgattcctacaaatacaaaaataaaaaatgagtataagtaatctgataataaaaatgattattagtaagaaatcgtaatgatggaatttcgattttcattctattggtctatgtccattccatattacataatcacaaagtcaaaatgtgaaaactctagaggaaattcgtgaataaatttggatagcatccatactttacgtttttaatgaaaaaggccacactttaattctttttatctaccaatcagtcaaacgggttttaagggctctataacttttttttatctgatataactttttttttacttatacaagataattttatatgattataaataaataaaaaactctagttcattaaacaacctgagttaccaatacacttttcaatatgcttcttgtaatacactctctaatattaattaaaatctattgaaaattaaaaatcatgaatgagacttattaaacaataaatagagcctataaatttgtggtttgagacaatttcaactacactaatagaaaaagtgctcaaaaaaggtgttaaagagtgtattattaacatttattttcttcttttggcatttaaagaatgagaaatgttaagaacactttctctaatttattaaaactacaaaatcaagaagaagaaaaacattgaataagatgtaggaccaaaaattgtcatttttaatcaatttcaaccaataaaaaaaggatatattaaaaaaaatgtgtatcaaacatttaatgaactgtctctaaaacatatttttcagataaagtgaatggtaagattcaatgtgaaaaacagattgcttgatgcagaaaaaatggtatctcaactcccgtgccatttttggtacaacttgaaccttaatctgggttcattaatgaaaaatctaagcatagtacacttgaatttattttcatgacgttgtctccacgaacctaaagactcttgtcatagatctgatttttctgctgtcccttttcaagctgtccttgtgcttcccattcaaaactatctcgttgtattaatatttaattgtgattcaattttaaaaatcataaaaacgatattgtttcgaagggacaatacaggaacaacttgaaaagggacagcagagaagccaagtcgccctcctcacctttaccattaactcccctagtaatggcaaatagctgtaacaatcttggttttggggggaaaaaatttagaacaaatagttgaaatgcctttcagacattccaaagctaaagtggagaaagacaactttggcgggctacaggagaatcaacaaaatataaccaaacaagatatgtacttactgaaagaaacatggctagtttctagcggaagatatctagaaggaatatatatatatatgtacatgccatcgtctttggcatgattgcgttacgtattacaattttatatatatccttttcttgtggaggaaaccagccaaaagaccccagaatataatctcaactattacaaaggccagtgtaccccaccttttggaatgaaatatgatctgcattaaagcttcactggcgtcaacctgcatattaaattaccaaattaaccaatcaagtatgagaaggtctatgcagtgacatcaatgtctccctccaccaaaaaatgctgttgtgacaaatttaggaatgcttatgttagtatttaagaatagcagtttaattctaattccaaagagaagtttataaaaatctaggatggggaatgttaactcctattggagaaaaattaatcttcgaaagaaaaacaagttcgagcttaaataacttataatgaaagaggagatattcaaagaatcattgggaaacaaacattaccaaattattttcaggagagtgccaatagaaaccctggataactgctgggaaaatgtcacaagctgccaatgcatatacaacaagagcattcattcccatccattgcagtaaaactgtaggctttctgagatgttctatgtcaacctgcaagaaaatatgttttgatgaagttgtaggtttggaaacctctgccagtgattacagttatctaattcacttgaacaattacaaatagcatcaagcaatacaagtcaagctaatctatatgttagaaatcatgtaattgtagtaatcatagtaataatgtaaataggaaagattatatattatgcaattattttaattagagtaaccgtatattcttgtaattaattgtaattccccttgcatttatgactcctaatataaatatatgcttcagtgtctaattcagacaaaaattcatccatatgctctcttattttcctccctaacactttagaatgacactggtgtaatttgatccctcccgtgtgtgtgagagctggctatgacttgatatttacaaaatgatattcaagttgtatcacaaacaaacaataatagtaaagcatagagctataaaaataattattattaatcacaattagtggcaacattgtaacagatataatcttatatgttctatttggactttcaaacttgaggccaagtttaagtagtgtagatttggagtttggaattgccaatagaaattgcggcctggactctatcagctattaagaacaggatgtcactactattatctttctctttatttttatttttttgctgtattgtgtgggttaacaaatgggctcaacaatgggtgggtgactgccttataggcacatactccccaccccccaccccccacccccaccccaaatatgagtgctgtatggggtggtcctaaactatggctctccaaacacattatatttgtccattgggactaggtgattaaccacattttgctcatcaccggaatattcatctgtctattatctcttttttttacctaggatatagattatttccacttaaacacaaggatgaacttacaatgtaatagatagcagtcacgactaagcctgatgcccctgcagtgatacacatgtagcttaatgtgtacagtgcttttgataaaggcattcctgaaaaactatacagttgttagagaatagaacctattgatcttaagaaatttgaaattagatagtacctaaaatctccagaatgtatcctacgagcaatagagagaaggaaaacaccgaccaaagaataccctctgcttgtggccctgaatagacaagaaaggagttgaatcataaaaaatatgcatatcctagggacaaattttaaatcttccacctaaggcactaggattggattcttgtacatcataaaggaatcataatccagacctgcaaatgtacaattatgtgcccatattgcaatcccatgaaacaagtaatcgcagccatcagtgaactggaagatttcagaaaatgaattagcaaacattgcatcaatagaattttaaaaatgccaatctaatctcaaagataaaaagtacacatacatgagagaacagtgaaaatacatcaacataacatagaccaagcactttgcaaaactcaataaaatgaaatatctagattattgatgactcaataagatgtaaccatagttttcgatgccactataataactaataaaagaaaggataaaaggagggagcagggaatgcttttcgaccttaaaataccatctgggtcaaatggtgcaaggcaccatccaggtggatctggaggcaagggtccatagtcaggagaattgacactacactcctgaaaatgaaaaaaaaggtcaagaataagatcatctaatagatttaaaaaaatgaaatttgaggtggcaatagattcaatacaggagttatccgagagtgcaaataaccttttttcttatgtacacaggacgctggtacatctgatcttcagcaagaattaatctatcaataaatcnnnnnnnnnnnnnnnnnnnnnnnnnnnnnnnnnnnnnnnnnnnnnnnnnnnnnnnnnnnnnnnnnnnnnnnnnnnnnnnnnnnnnnnnnnnnnnnnnnnnactgtaaaaaaatgtgtgtgtttttatatatatatatatatatatatatatatatatatatatatatatatatatatatatatatatatatatatatatatatatatatatatatatatatatatatatatatatatatatatatatatatatatatattataaaacagtgtctagagtccaaaacatcactccttaagtgatctacacaattgcagcacagggcagtatccttaaaaataaaataaaataaaataaaaaaggcaggaacaactttggacgatttcataccttgaataccagaccgatcgaaacgccaaccacagagaaaaaacggcattataaaatcggctagtgtcaccccaaaccatggagaatgattcaaggacgggaatgcccttcccacgttgtcaactaatatcatcaactgcattgaagagattcatttcatttttaatgcaagccaaggaggagcaactagattccagttattgtgaagtaactgaacttagcaaaatcacaagatggatacaagtaactaggtaactaacagacagtgaaattaaaaagaatattaaaacaacagtcttatattagctaatttgcttcccattgtgttcatcgatggtaagaaataaattctaagctagtaaatattgctatttaataagaaccgtcttcaatgagtaggactttggaagtactaactactaacaaacatgaagaaggaaagagagggtaaagaaggtgtatgtgtatctgtatgattggatggcaaaggacaaattgagatagtgtcttcattttgatgaatcaaaatcatggacaataagaggtcttctgcaacaccatctacctcacaggacatttttcttcctacaatttcgtctccattatttgggctaaagcccgtataatagttggcctgggtatcacttgcctccaatataattattaaaacaaagggaagagaagagatggtgggtttcatctcaattacacagcgattttagtctctgaatttggtgaggacgttgttacattaattccttaaattaagaaaatgtcaaataagattctaaattaaattacttacggttactttaattcttaaacatacgttaatattattatttcagtttcacatttgcaccttgagatattttttttttttatctcaatttctttctattcagacaaatatcatagtgacttctaattttaggagctaaagtgattgtttgttcattttattttctcgtcaatttgaattaagcatctggaaaaaaaccaacaaactaaattttaaaaaataaatcatttaaaatagttgttaatccaaactgatttattatttggatttggataaagtgctatacttctttcaacatgtttagaatattttctatatatgcaatttaagcaattcattttgaatttcatatatcatgttaattgactctcataatattacatcatatttaagtcattcatacacattttattttaataatatagttttatacaactcttacatgatcccacctttagatgacctttaaatggcaaaaaaaaatattttttaatcttaagcaatgttatttatagaaataaccaagcttaattttaagcaacgaacatgatacataaatatcctctaattaaatgaaataaaaaaaactaagcaatgatgtcttgaaataggcaattccttaagcaactagctgaaaatgcttttaatgcattgaaataaactaatccaatacactcgtctattataaactaatcaaatagaagcctagcttatttcagtctttcggtcaaatgaatctttaacaagcttcattaattcgaccatcctcaatcatagttgttcctgtcgttccattattctttcttccaatttagtgtagcgcaagatgccctgcagcatccaaaagcttacccagtctttctgcaaccgtagtcaaagttgtatcactcttgcagaacgcaaacctgacgtatctcttctggtagtttaagctagaaacttcatttgaagacaagtttgtatgaaaaaatccttgacctggaacagccactacccctgcttctattatcagtttcttaacaaattctacctgtgaacaaaaaacacttattgctagaaacaaacagtagaataatggacttatgtattgcagaaaatttccacttagatggagttaaggactataaccgttgaaatagttcctacactataggagagtaaagagtgcacatacatctgaaaggagccaattgtcaggaagctcggcaaataagaagaaggaaccctgaggtataaacactatcttaaaacctactccatctagcaacttgatgatatagtctctttttgattgatagtcctgcatgcatttaaaaaatatatagctttgttatgacttctttttattctttggggaggtgagtgaataatgccatcaaagttctacttcttctagttgtatagaacaaccactagtaccatatctcctcaaatgtacttttgacacttactcttctgagtgattcaaagtattcagggggacttctcaaagcagtcaatgcagcttcctgaaaaggtgccggagcagaatctgtaactcttccgtgaatatttctgatagcagacgcaagaaaagctggtgcaattgcccatccaaccctccaacctgatgatacatgacagaccaacagtgagttaacggcattctttataacaatgatgagaaggctaaaaaacttccagtgtagtttggttcatgcagctttgacctgtttacctgtgacgctgaatgattttgacaaagaagacgttataacagtccgctctagcattccaggaaatgaggccagggatatatgttttaggttgtcatacgttatatgctcatatacctacattaagaatccaaaagaaggctaaacattacactatttaaataccacacaaatattctagtcttgcaaatttgaaattccaagttaattttcttgttgttaggcaaattcatgcagagaagtacaataatcccaattaaaaagcagataaacagtgataacattttgtaaaggaaaagtcaattaatggcaaaaaaaaggagaaaatgtcatgtgatagttagctgttggcatgtgtaagttgtagccccctaaaaccacatttacgtgctataggctatagcctctaggacatatttcctttaaatacactgaatagcagtggcagaagaagattcatatggaccatgcatatgtatatctaactattttaattcatcacacaaatgtcatgtttaatcctggaattgaagttcaatcagcacaaagtaaaggagtatcatacttcatctgttatagccaggcaattccggctgcagcattctccagcaataatctcaagttcctcttttgtgaaaacctttccagtaggattgtgaggactgtttaaacttcatgtcagcattttgtagttcatatcatgagactaaacatttttttaaaacattgtgatgcataacaaaaaacttgttgtaacttgtaagttgtaagggattgtttttatataacacggttactgaaagcctacaaaacaaaatgatgaaagaaaataaaagcatctcctcaatgcttaaccctttttgatagtggcctgtgaaagaaaatctgaaccaaagaaaaatgaaacacaaacaaaacacaccatacttcttcaagaattccactgcctcacaaaatttgggcatatcagaggctaatccttgggagttcttgacaatcatcaaaatacacaaaaaaagataacttgaatcattaattacattcaaaatttcaaattattacaagcttaaaccataaactgatagcaccagcatttcttattcacattttttattttataaaaatatccactcaaccgccattctattgattgaaggatatcaaggggactagtctgaggcttcccaagatgaggatgatgtctatctaaattctaaagtggaaggagttatgaatttgtgcaatttctaacctgttcagcactatggctttggttttctcagtaaatgatcggagtaatttgcttggatccagagtccattgaggcgggtcaagtggcacgtgaatctgtccaattaagtttacaaaatcaaggggacattacataaaggacaaaattaatataatgtaatactactattatcagtagaattaccacaacaccacatagaaagctgcactatgaatcattgttcataaatcataaatcataagtaacacatgatacagacttaaacaaggttcaagatagcaagcttacagggactcccccggccatggcaacacatccttcatacgtttcataggaagggtcaaaaagtatgacttcgtcacccggatcaattgctgtttgaagcacaacataatgacaattaaggaaatactatgtaatgtaactaactcgtaaccttaaagctcgtaaactaacaagattacaagtataacaacagaagagaacatacttgcaaagattgcagctgcgaatgcctcgctttgaccgcagcaaatagctacgtcagtaacagggtcgatgtctaaaccatgcatttgcttcaccatcttggccaagagatcacacacaccttgcacgtgcctcgaatgaattacaaagagtagtttacatcaatagttgacaaaatgaagatatatatatattatgttatgggactagttgtagtagttatgttgtgattgttgtgtgaagattgaagaaagctacctgtactggttgaagtcggaattgatggcagaaacggcggcgtttttgaggtggggaggggaggggaagtcggggaagccctcggcgaggttgatggcgttgcatctctgagcgagctgggacagttcttgaatggaagacgatgtaatcttctttgctgcacgcgacaactttccttccattattatattttctctgtttttctttcttacttcatctcaagcatgccttatctttagctgtctagagatggttacatattcatcgttttgcacaactcattaatatacaaaaattaagaataaattattcaaataatacaagaaaaaataattttgattaaattttatttattttttggttaaattttaaattaattaaattcttttttttcttataaacgggaggattaaaaaaaaaaaaaaagatgagatggttgcattggtttgccctcctgaacccgctcaaaaaaatgttctcattactcaattcaaaataaacattctcatggatgggaagaagaatcataaaataaagaagaaaaattggaaaattatttaaggaattaaggggactattagacacttggaaaaagacagagacacaagacatatacgatgggtgaaataatttgataagaagaaatagcaaagagaaatagtgtcatttttttaatataaaaacttgaatatcatagtatcaactatcaagtatgcgatttttagtagatcactttaataaatgaaagggtcccaaatgtttgggagcttatttattttaaatttatataaacagaaataaaagcaaaagaaatataataatttttattcatttaattcactgagtggaaaagataataaaaaatagataaattatacaaaagatctttttactattataataataataataacaataataatatttttaattttaaaaataatataatactattaattaaaatattttaatttttaataattctatgttacattaaaattagtagtatttaaaatttaaaaagtagcattataagattaaaacaaaacaaaaatatctcttaaatttctctattttggagggaaaaatttttgtgtggataccacaattttttattttttactctataatatcacctaacgaaacaaataaaatattcattaatttttttgaattttcattcttttttcacattcctcccttcaatcacacaaatggaaaaaaattatcatatcatatttgcaatcaagttgaaaaaacaaattcaaatcttcaataattttttcaatgaaatgttataatttttaaaattactttctattttttaaaacaattcataaaactagagttaaaataatttctgccggtacaaaattgaattttatttccaattgcattattcaaacaggtcttagaaaaaattaatatggagttacaagctaaagcccatactaacttaagttcatgggctaaaaaaacccagaatgtccttaatcggctgatttctgttgagcccaatgcttgacacttttgtttacaaatctgaagtttgcagtctcaaatagaatggcaaccaaatgcttattctcgagagatcgggattaaaaaaaaaaacaactagcatatatttacaaaaaaaatacatatagtatatgataaaaattgacattcatggaaatcaccctcatccaatttctttataatccattatgagtaggctgatatttataaatattggtgagtatttatagttttaaaaattgaaaaaagaaaataatttaatatcatatactataattttttcaaaaaattaaaacacttacaaaattaaaataaaactttaaatatatacccttacaaaaagatagtaacgtatatgtattagcgcttagggacttaggatatttttacatagacaacaatacaaaaactagcttatcttatctcaaaaaaaaaactagcttatatttggtaaaaaaaaaaaaaagcttatctattcatgtagtatgtattactaaattatataatgtcatgttaactttttatatgtgtaattcaataattcatcacgttgtctaaatttgaaatatctaatagcacattttcgtcaattcttcttcctcgatatatttgtatttacacatttccccttcttcaaagcttaatgcatcattcataggataaatacaaataatattgttatactcaattacacacgtaaacacctagctaaccagcaaagagtctggcaataatgttggacacgtctttctcttaggagtgtattgcgttagaattttaaaatatttttttagcataaaaatatttttatattttaaaagacattgtgagaatacattaacttttgaaatttttttcaaaaaaaaaatttataattttaaattttgtaatttagattttaatggatttataaaacatgaattcataaaatttgaaaaaactttataaatttacaagattttaaagaatttcaagaatttttagaaaacatttaaatttacaagagtctataaaagtaattgaaaatctacaaattcttcttttactcataaaaatccaatgaaccttcaataatacccttaattttttcatcaaaaataaataagtgaatcacatgatctttttttttttatcttattctattcaacttttgaacatagtaaatcctatccaattaacaattaaagctaataaattaggtttttattattgtaagtttttttttcacaataaatgttttttttttaaagacaaagcaaatcagagtactagttatagtgtccacaaatcatgaaagaagacatgttccaagacaggtgtaccataagaaatagaagtttcatgtttaatcccaactttattcaatacttcattctatgaataagttttaatagatgagatgagttttagataacttaccctaccattactaaaaatgatgttatttctcatcaatcaaatccctcaatatattgcatgtcataaattgtttataagtttgcgaatatttttagtgttagaagcaaattttcatttgaatatatagttaagaatgaatgtatttatattgataatgaaaagttgaataagctacaataagtgtcataaataacatacaaaaagacaaggtccccatgaatcaaaatgtctatatacccataatatacaacaaataattgtatttgtatttcaataataaaaagttgttatgaatcaacaagagaaaagagaagtggtctatacttgaaaatcataagttaacatgttattattgaagattatcaaggtattaaaggttatgaaatgtcatacataaattattatattatcttcaagaaagagagaaggaattactagtaatgagtagaaaaaaatttcaaagaattcttggaagttttttttgggattgtttaatatattttttattgaaaagttatataaaattcattaaaatccatactaaaaaagaaattcattgaaatctctctatattttttaatattagatgactttttttaacgtgtaattttttttaattaaatataattgcattttcgttatacttcttaaaaaatcataataatcttaactaaataatgcaagaattatttatgttatttaaaagtcttgatgaaatatcttaaaaccttttttcttaaaaaaaaaaccttttgaaatccttcaaaatcataattaaatacactccttagttttcttttgattctctagaattgcacttgcacacgccatcaagaatgcgatgtatatgcatgcagccaataaaactatctagctacaaatatcataccttacaaagcctctctctctcaacaaatagttaaaactgcttgtataaatttttactgtgttatgaaactattacatgatcatgagacgatatcctagaagataaaacaccgacaaatgatgcggccagcaatacacaactacactacacaagcatatatctcgctctccctcataaccaaaggccttcatcaattctcttgttcttttctttctccttcaacaaaccatttccaattcaaaaacatggctcgtaatttttctcttgtgttcaccttgtcctccattatttttctcgtaacaacagtactaccctccactgtttcatccacctcaacactggaaaaacaccaagttccacgcataatgtgcgatgagtgcaagcttccacctccacctcctcctcctaaaccaatagagtgtccaccgccaccgtcccctccaccaccgataccaccatcgcctccaccaccattgccgccatcacctccacctccggttattaaatgtcctccgccgccaaaaccactaccactgccgccaccaccacccgtggttgttgaatgtccaccgccgccaaaaccaccgtgcggaggcggaggtgttgactgcttgctgcccacttttccggagacaccagacggaccccattacctactatcgccaccgggccttccgtcgccaggaacgctagatcttgatgacattatcaacggtgcaaacatgattaatccactgctacgctacttctcgttgcactccttcacttttcttctccttctttgccttccctatttcttgttcgtttgatatatgcatttttgtttcgcttctctcttttattacttgagcaagtggactaagatatttgaatgagaaaaataaattgttgtttagctcttcgtagaaaccaagcataagattaattgttgtttagcttcgtgtccttgactagtgttgaatttaacgatcgaataaatattattggttcaatttgttcactgattaatatgtatgcttaattccagagtgacggcctcttcttcgtttcttatatctcgcatatatatatatatatatatatatatatatatatatatatatatattattaggatatatctcgcatatatatagactgaggattagagctttcgatcaattcatttgcttaattatgcgacgtagagtgtatattccttttcagagtatacgaaggctatcggtacgtatatgcattattcatcttggtgttatttaaaagagtgattaataatatagtccaacattctttcaaaaaaaaaaaatatatatatatatatatatatatatagtccaacatagattctctttacgtaaaactttataagagaaaaaaaatgaaaaggtaaaatagaattaattaaattttccataagttaaaatcaatttacatgtttaaactttaataaatttctctactctaggattttaacttaatttaattcatttaggattcttccctgaagtagtggttactacttactaagaggttggagtcggagatgccatttgatttgcattgattcgtatcaatgcaagaaaaattctatcttcggaaatattttctaaattggatcgtaactcctaagatgacttaattttaacaaatgcttacgctcacatgcatggtttagcacttggggcctatggagtatggacagtcctagagaggctgacctcccagctaggatgacttcgaacaagttcttatcaaggaggccaattaacttctcagaatgacttctaatcaagtgcttatgcccacatcacttagagcatgtttggtttggggataagctgagcttctcatgggtctcatctagtttcatcttctaacgtgaacagtacaataaacacacgaacttttgaattttgttaaatccttttttttttataaatgattatcagtgtcctggttaagaaatttaaatttaagcaaaaatggtttagtatatatttcaatattttatcacgttgtatgaaatttccaatagcattagcccaatttattttatttacgcatctccccttcttaagctcagctatgtatcacatgatcaatacagataatattgtactcaatgatatacagacctagctaatagctagctagcaggagtcgctgcataaataattaatttcttggatataatttttggattctctagaatagcacgtgattaagaatgcgatgtatatgcatgctgccaataaatctatgcacaaatatcttacaaaagccaatatatatttgccttccgttttgtccacttattagatatataattgacgagatgttatacaaaaggcctgatataatccatttgaaattaatttcttattatttatacatcctattcttcaatcttttaatttttccccaattatattcttgggcagtttgcaattaatggttttcaacttttcgtggagaggtttgtggttggtttgagatggggttcagttctttgcagttctccgtgtcaattcgcttgggctcgatgtcgttccagtcaaagaaggtgaacgaggcgcaaaactcgctggttttgttgttgctgaagacaaagtagaaggatttgtgggtgacggcaaaacgtcgtgaaggagggaaaaaggatgagagagaatggagataggggcaaattgggaaaacaatggaaaaatagaaaagaaaaaatatatatcagtttaaccgtaaaaatatgatttctcgcaatgcaaaaacagtaataatacataaacagtcatgtattttagacatatatttaacattcatttttttatctccatttgtctcatcctcttaaattatataacttatcatatttatatttgtctttttctccttcaagttatctaataatatagggtgtccattcatcttattcatgaaaaaattgacaatgtcttccaccctagaccttgctatagattatccactacaaacaattagtttaaattaattaacttaattgtattttattttacacgaagaaaaacagatcttttccaatttaatgaaatgataaatacattgagttacattattgaattaagtatgatcatgcttttaacttgattatatttttgatcccttaaattaggagctctatttttttcctccaaataatttttttacattatttagttcctaagtttaaaaaatattttttttaatcctttaactggaattggagtcaataaaaagtacttttctatttgagggaagagactttaaaaaaaaaaaaaaaaaagactttccgaatttgagggattacaaatgcaaaaaagaaaaatcgggcacaaaaaaacaaaatacctaatgtgagagacaaaaatataattaatcagcatgagtaaccttttagttcccataaaaaaattatccccataaagtagaaggtttattttaatctttttaagttttttattttagttcctacataatcataacaacgttaaataaaaacagttaagcttaattttatttacaaagtattgttataaacttgattaatgttgttacttgacaagcaaaaaagtaaaattaaaatttttaaatctttaggaaaacacgaatacttggtacgagagaaattttaagtttctgtttggaatgtttgatttttctgaaaaaaatgtgtgaaatttattcgatgattatgagacgatatcgtagaagataaaatagcaataaatggtgcggccacgggccaccaatacacaagcatataatatatcggtctccctcgtaaccaaaagccatttccaactcaaaaaacatggctccttttcctcttatgtgcttcgttattttgctcctatcctccactgtttcagtcacagccaccgccacccaaacaaccttaacagtgggaaaactcgaccaagttccacacataatgtgcaaggagtgcgagcttccacccccaccccctaaagagtgtcctccgccgccgataccactagcacctccaccaccgttaccaccatcacctccaccaccgttaccaccatcacctccaccaccgttaccaccatcacctccgccacccttaccgccacctataccgctatctcctccgccacccttaccgccatctcctccgccacccttaccgccatctccttcgccgccaaatctaccatcaccaccaccactggctccaccaccaccattaccaccacttgcaccaccaccaccaccgctacccccattgccgatcccaccaaacggacccggcgaatacctagtgccaccaccgcgcgatccgaacctgccagatcttgacgatctcaacggtgcaaagattattaatccactgctatgcttttcaaacactagttacttctcgttgcactccttcactcttctggtccttctttgcctcccctattactttttcatgtgatacatgcatatatataaataatagaatgcattgtttcggtaattcttgtcctcccacttatctcccaattaattattattatgggtgctttataacggcgtacaaccgatgcagtacacacttattccataaattaaaatcaacatgcactttaacttttataaacttattctttcatctaacttctcctaaagattttaacttttaatagtaagtggttctgtagcaaacacacaaaccttttgaattttattaaatactagtattttatatttttttattatttgtttcaaaaactaccattgttccccgttaattagtatttaattagtgtgtttcatacaaatttcttttatactaactagcagctctcttgtaccaaagccaaaacgaaattgcttaacagagagaaagaagtttttggtacagaaaggagtttttttttttgtaccagaaacaaaagaaaggagttttttttttgtaccagaaacaaaagaaaggagttttacacagtacgaagtgtaaatgaataacctatttccgtcaatttttatttatttatttattttttaaccgataacaaggaaacaaagtgttttttctttaacttgtagtaactttttcgtacagtgattctgcagtcattgtacctatacaagaaatacatagaatccagtttgtctgttttttgtttcgaataactgttttgttggatatggattggaagcgataaaactggggggaaatgaatggagcttgaaatatgaaagggactcgagaatacgtcgtttgtggtatggggtagaaaattaaccttatacagatttaggtccaccgtaagcctatcaattttgttcgatggacgagtttttgttgtccacttgttttgtccttatgctatgatgagactattacaataaatttgtgttttaatgtcgattaatttttcttatactatgagcattataagaaatttgtgttatcgtgtacactaaagaaaccttatattagcatcagctttacatctgcttgcgttttgatgcttcaaagtcagaagttacttagttgcatccatgtttttgccaacgctaactagctcagggtcgacactaactaggtcaaccaaaacatggatgctaacttggatgtcatcataagaaaaaaaaaatgccgactcctcctgtgttgtggaaaccaacctgttggagacactagattagttgatcaaaggttgaaccaatgtgatgtgtcacttattgtccctattaatactatatatatatatatatataatataatataactagtaaaattttaaaaaataatataatataaatattatttttgtcatcaattagctaataataatacaatggtctaatgacatctgagtcaaaagagataagttagttgttacgtaaatattgaataatgaagagaaataggtagatgagtggaattcaatggttacaacaaaaacataaaaaagatctataaaaagcacagtgaaaaaatagagagaaaaaatgaaaaagaaaggacggaaaaaagaaaaaaaaatagagagaaaaatgacaaattttttgtcgaacgtgaagaaatatttaaaagttttgactgctagttataactcagtgcaacgattaaagaggcatgcacaaagtctggatttactccattgtatgatttcgcatgttggcttattaaaatgaaaggagtacattgttctttctctcttccatttcatacgtgtcgttcttatatattttctataatttccttttttatgttaatttgcttggttcttatatatgttaattgattttattattcttgctatcattcttttcatgagcctctgggcgtcatagcttctaggatttgaatgtggattaacttgtttttactttatacataaaagaaaaataaattctcaaagggaatacattagattgaatgcatgtatgtgctaaccttatgcttcacctgtttcatagatggtggagaaaattctttctacaattgtaaatctagttccccgcatattttattttgtgatgaattatatatgttgtgaaaaatcacctgtataattctatctcttttaatcaacagcaacaaatgtaattcatggtaaaataaaaattagggattataactttgagtgttttaatctactcgctaatgctggatgcgattctaagtaatctctttttacttcatgcaatggttcgataattttaattgagtatcaattctacctttaatatgttcaaatcacaagagtttatagaatagtcatttgctatcataaattctttcgctagagtaaatttaaaaataaaaaatttcaaacacaatattttattaaaataagtaacaatttatgatattaattgaataacaattctatctttaacgttgtgaattgtaaggatttgatcactaattatttgctaacttaaatccttgtgttaagttttaatagagtataaaaaaaaagagtttttttataacaagattcaagaatatatttttttggcctaaagtaaatatttataaaattaatgatgttgcgcaattaatcagaggtccctaattatatatatatatatatatatatatatatatatatatatatatataaaattaaaaattaattgtttttaattttgtattcttatttatattttttcagcctttccaatttttatgtaaatatcagtatttctattatatttctcttaaattaattaatcaatatgttcactctatttcttatttatttctcttctttccttttatcatttacgtatttttactctatttccttcttcaccgtcaaatatactgtaatttagtattattttatttcaaaactttaactgttttaaaatttgaatatgtactagtactcattttttcaatcatttgactcttttttttagtgaagtattaaataaatttgatttttacatgatacttatagttgaatattaataactctgaatttagtggagtaaataagattattttaatttaaatttgtataaataaaatatttcttcatttctagtaaagaattgaaaaaggagagaatagtaacaaatatccggcaccaacaaaaaaaaattatactgacactaacaaggttaaaaggaaataattaatcttattattaaggaataattaatctttattttttttggtcagcaggaataattaatcttattttttcaccaaattgtttttaggagtaacttttatacacttattttattttcactttatttttttattacattactcatttataagttttttcataactttctttcttcttatttaaaaagaaaaaagaaaaaggaaaaaagagagaacatgatcagttttgattcgacccacttgaacgccgtttgattttaccagcaataataagccgccaaaatgtaattgaaaattgaaattcaaactaagtagtactattggtgctaaattaaaatgaagtgttatttcgcggcactgacacctagcagttgcagtttcctcaaaaaaaaaaaaaaaaacaacagggtcaaaagagtaacggcataccataaactttacttatctctatccttttcttctgcatctgcactaaaatatactattttgttgatttgtttttctgtttctgtcaatccttccgaaattctgcagaaaaaatgtcaaaagcaaacgcaaagaacaaatccccctccaccgagctccaccctccttacttcgaggtatctatctccctactctgtcacatttatttgaaattttaatgaaaggattttgtgacggtttttgcttttttgttcttgcagatgattgcggatgcgatatcgtccttgaaagaccgcacgggttcgagccagccagcgatagccaagttcatcgaggacaagcacagcaaagtgctccctcccaacttccggaaacttctctccgttcagttgaagaaactcgtcaaatcggagaagctttacaaggtcaaaaactcttacaaactttcttccgccacggacaaagagacccagaagaataccgaaaccgagcccaaacagaaggttgaaaagaagaagaagaagaagaagaaggtgggtgagaagattaagaggctgagccaagtgaagacacccgaaactctgaagaagaaagcacccaccaagaaggacgcggcggcaactaagaagaaatctgcgtcggcggtggaaggttcaggaggagggaaagtgaagtgtttgagtcaggtgaagacccctgaggccttgaagaagaagaagcccaatttgacacccaaaccttccaggcccaacaggaatgctaggaaatgaaaccaccacttgtgtcgtatgtatgttaatgcttttttttttttttttaagttctgttgccttgaagtggattattgttatgatcaacttataacagttgacgattgcaatgtggtagtttctgcgattatttattcgatgtgggattttttcctcctaatcatttttttgggtgtgcgtttattttagttttatataacaccggaaaatgttcctgaaattggctgcaatgatcccggtttacaagctaatcaattttgaattgtgttcatctattttggtacaatgagatcagggatcagcatacatgtcatagcaatgcaaattatctgtgtgtgcaatttcttttcccatttacccgttcttcattttcggtaatttaaatgtcaaagctttgtgaaatttatcatcctatgttttttcatttgcctgttacattagtatccgacattttgtgttcttggagggggattacttgttagagtggtcaaaagttgaagatttttactgttattctacctatattcttcctcaataactccttgttatcttgagccttgatttctatgaccaaaaaacacataaaaagtctgcttgtaacaaattttgattttgatggtgccttgttttctttggttttttcatggcaaactagcctagccattttggtttttgcttttccgaatatgtaatcttaagaccttaaatcgtccttgggatgatgcagtagagaaccaccacgactagtaataagaggaataaatatattttttagtctttcaattttttttattaattctttaaatttttaaagtattattttaattcttttttgttcattgtgtttgtgattttataatttgtgataatttttaaccgtcaaaatttatttttaattacttttttaaaaatgatttttgacaattttaaactattaaaatatttgatttatatggtttagtgactttttttttacatattttggaagttttaaagaagaaaaataaaaaaacatgcatgtgaaattgtggcaatttttttatatattttaatgattttaaactatcacaaattatttttaaagaaattaaatttcaaaaaatctaatcataaaaaattatcataaattatgacaccattaacactaaaaatgagagagattaaaataattttttaaaaaaatttgaaagactaataaaaaaaatttaaggactaaaaaaataattatctaaatttaaaaaactaaatacatatttaggccctaatgtctctccatgtgtaaggtgtgtttgaatttctgcttcatacacccaaatccctcagtgtgtaaatgtaaaagtcaaagaaacacagccatagtcttgggagtttcaacttccttagaagtagaataggaataggattgcaaccaaaatgataatctataatacaacaaagttacaaaacaaaacagctaacaaagtcaatgactacttaacccttcataccagtgccaaccatgaacaactgcaagtccaacaagggtcacagttccgcaccttaaccaccgtgaaacccttgtggcaaaaactactacctcgtaacataatatagttgtgcatgtgggagactgggagttataaggttacttgatgattaaaggaagaaggaaaagaatgagactgtgaatttgaattttttccactaggaaaaattaataaactaataactaacatttatcagtaaaaaatataacacttcataatatgtggattgtactgttatatttcttggcctcgcattatcgttaactagctactgccaataggacatattgtatgatttcctcatgatcaataagacttttaacataggaaaatcccacatgggtccatcatcaacttcattgcaccttaatactcatctaattggtaacctgacattagcatcaactctaatatataccactatcgagggaaatccctctgtacacaacaatgaggatctaaagatagtacacacaaacacagcacaaatagaaatatataacaaaaaaacacaaatttatatatagtttgccatctttttcctacatcaacaataacattttaacaaatattcggtatttcaagtaagattataagttttctatataaacatgagaaagccttctatataaacatgagaaaacccttcgtattacatgactccctctcacttgcggtagttccttctctcatcacaatgacctattttataattaagaatgaatctattcataaatgtgatttagtgagctttaattgtcccctctatcctccactcgacctcccgattgtatgattgtggaattctccaaaaaacaaatcaagatacattccactacttaattaaaatgttacttaactttttacccacttaacatttatttgaaagtttgaattgtttttaatttccaacacatttataccacattaataattattttaaatacatatcttcaattctttaaaacacattcacatagagagatgaaaaactttagtgtaataaagttccagattgagcattacttcaaacattgtgtgtaaaatatggaaaagttaactggatatcaagttacattagagatctatcaaaatttgtttccaaatcaataaccgttgtcacaacaaacttttttttttctcctacttttcaacaatatgaaggggaaaaaaaaagcattccttaatttaatagttcttagttattgttcttgtgaaggataatatgacgagtgacaaaatccattttgatttattagatttttagaacataattaataagacaatttccttcaaggttatggttaatgtagataaattttttttataaatttatgaagtttctttgtaagatgtgaaaatcgatgattgacatataatatttttttaagagattgacatatactcttggatcaataaaaaatgtttaatttgtattatttataaaatatgtttttgtttatacgttcttttattacaaggaatgataatgaaatattgggaaaattattctcgagttgaatattaaaaaaaatagtatatgcaatttgcttattcttatttagttcattataattattatttataagtcaaagtaatgtttattctacttatttttgtttaaaaaatatttgttttgaaaagaaaattattgaaaaattagtgtgaatctaattatatatattatatttttttatctaatgattctaatccaaaattttagttaagaaatttaagtcaagttacacttacataatgttggctgaatgcatattattatatactaaatttttcatatttaatattttcacaaatatagaatgataaaaaaaagccattaaacgaatttattttttcataattactctttttgatacgataggataaataaataattattttaaacttatatttattcaatcaacatatttagatatataattcacaagtttaaaaacgtcttacagaaattttatagttaaaattcataattgtacatataagtataatagtatatttttaatttacatgcaagttccagataatacttttttcttacaaatatttatgcaaggtataataatttaatgtttaattactcatttcgtatatgtgtgtaaacggtgtaaaccttgaaaatttttgcaggcaaacaaatttattacattttttatcaataaaaataaaagaaattaaacaacaaaaagttattatccatgacataacaatattttttttgctaaaaaacaaaatatctctatagcaagttataagactaatttttcaaaacagatagattatcgaaataaattttatctctcccatcaaaatcatctccatagtttctaacaacacataatattctcttagacatataaattaaaacctttctaacataatcaaaatttaataagttttggtttctaaagttagttgtcactatgtttgttaactttagctattattataattgcctaaaaaaaggttattattataacactaccacaaattttaaattaattaagcggtcttaatagcaacactgtgtaacatgttaacgtcaagaacaaaaacatattaaaatttactcctctaagaaactaaaccttatgattttacatataatattaaaagagtaaaattcagacagatgtagaaattaaaccataatttgatattaatttgatatggacatatcattttcgttcttcacttacttgagccccactccaacgtcgctaattcttcacttcagctatgactttcgacttcacttagttgttgacgttaatctgtttgtagacgtacctatataatttaattaatacctaacgtggtgaacagaactggcatcattgatggaattgatgttaaactacctgaaaaagaaccaatccctgcgtttcaacacaatcaatgagaaaagatgcaagcaacaacattgtcgtccgataataaaaacaccacaaaaattcaaatcctttcggtttgtgttgtttccattatctcataataccaactgccacgttttacatcatatttttacgtgaatgaatatgtgattaaatggcttagagttttttttaaaaaaaaatatatttttgatatagagtattacccattttgttaatcatatttccattgtataacctaattattatttttagtgagatttttttaatcacattttttcactacttataagaatttagttgagtatcatttggatcaaaccacaaattgataatggctaaagtttgattcatgttccttcaattacttttaaaaaaaaagttaaagcaaattagctaagcataaaataaataaatttgtttattataatttatgcttcaaatataaataatatttatataaaaatatgttaaaaataatataaaataaaaaagattatccatttgccttttcctgataaattaaacttcttaaataattatatagtttgtgtccttaccagtattgtaggcgacaattatctcttaattattaccctttttgatgttcgaaagtcaaattaaactttagtactaccccacctcggcccggtggtccattctagaatcacactgttcttccgtaaccaacgaaaaacataatttctttttcttgtaggagaaaccaatatgtcagtatccattacattaaacaatgtaagtcgatacggtgagagagaatttggataatttacataaagttttacattaaacaatatgagtaaggaacatcttatacatgggtccgatccgaaccacgcctcttcactcttcaggcatgccgtcaacaacacaatttacaaacaaagcctgtatattacaagttacctgtaatttaagctttgaaatattatattctgtcaaaaaaataaaagctttggaatattataatggtgactaaaaaaacggaaaatatcagaaataaagatgttaatctcccttaaataaaatattgaattcaaattttcataaataaacaaactctttaagtgatatactaataattctgactcaaagagaatggtctctaataaaatataaatgtgttgattatcaaaaccatcaaatataattaattctattagaattagggtgggaaggaaatccaaaaaaaaaaaaaaaatagaaaaaactagagtgtaggggaaaaattagtagcgtagcattggaaaccttggcacgtgggacgtgaagtatattattaattaggggaaggaacattggtgataaactcagctaccagagtgggtgtcgcatttaatgtaccactaccacctctacctcaccttctttctatgcatacatatatacgaaattattaaattaagattaggagcgtacccagagggtgctttcccatgcccatgccatgtgttatttcgtctgcatgcgcctaacttcactcttctttctcacccacccccatttcatttcttcgtaagagaaaaaaaaaaaaagaaaggagatggaaggcatcaccgccagcgtgtgcaggggcgtgaaggagtattggaggaggaaggggtacaagaggctaaacgggtcgggccggaggagaaggaaccgggtggagcttgggagcacccgaaccgggaagggtcggttctggaggtggaggatcagactcgcacccaagatccgaatcaggaaaatcccatcgccgaagaagatggtgctgtgggttcgggacgcgtacgtgaggatgatgctgggcctggccaactcgcggatcatgactgtgagcgcctcagcttcgggcttcggtgggaccctcgcaggtgcggacacgtccttcgctgggttcgggcgggcccctcccaaggagtacgacgagaagaccatcatccagatctacaagtccctcctcatggcgcatggtggtccattagttcctcgtgacgccgccgcaacacaaatccggtgaccctaacggtaacggtaatgcgccaacccgtcaaagcacccttttttcttatcaattgttcaataccttcttacagttacttccctcgatcgaccatgttaatttctttctgtcattctatattttgtgatgagggtttaattactttttaacgtgattctatcaactcgatagattcgtcttttctcaccgcccctattcctaaactacatgtcaacgtcaccggattatacacagacgcgaaattgtattattatctatgaagtaaggacactccaatttcttatcgtgtccggttattacgttctatattttaaatattatagatgttcacgtgtttatcgtgtccggttattacgttctatattttaaatattatagatgttcacgtgtttatgttgtgtctggtgtccgtgtcgtgcttcgtatattattatgctgccaaacgcggctctattgatttcgaggtttatcttgttgctagtgctccatgttttgcgctgaaagtcaacccaaattcaggaatccaaaaggttatgaccgatacgtaaagatatatatggctagttttataatatctttctttatgaaagaattttgttggtttatttaaattaaagcatgggccacaagcccacaagctcacttacattgaattttaattgttttttttactcgaaaatggtgataataaaataattgtattttaaaatactcgatcgtagaagatatgaatatgatactatgtaatcatgcattacttatctaaaaaaaaaataagctgttttatgcgggtgtgtgaatgactttatctactcgggtgaaataaaaaggcaaaattatatgacgctgtatagcttgggaatgagtttttttttatattttatttttaggcaagcttgggaatgagtatgcgtaggtttttaattaatgcatgcttaacttcattttgtaaaaatttaattaggtatatttaggttaatctctgaaaatgcgattaggtgcaaagtagagatcctttgtaacactttttttttatttaaaatgcatcaatatgaacatcatctaactcaaaagtatacgatttattaaggaattcaaacctcttgcactcaaaccatggtaattctgttttagtatctaattctagtacatcttaaaaaagacataagatttttgtcattgtgttgccattagcgatcattccatttatttctataataacacgtgccctgcataggtactcaatttataatttacaactttttaatatatttttttaatatttttaaatttcatgtaaatatatattagtagatatgtataaaaatatttttaaaaaaactatataaataaaatgttttaaacgttataataattattattattaattattaatagtaatgataataataatgttaccattcaactttttttaaaatggttgcaactggaatgtaataaaacacctaattaagagtggaaacaagatatatatggtccaaataaggttttatttggtttaacccatttaaaacattcattgaaaaagtttgatatgtcatttgttatagttttatttgtctaaactaacttttttaaaattttggcttgatctgttagcttatttagatagctatttatattttaaaaaaaattagatagactcaatctgaatagcctaattgactaattccaaaatactgagaaaaattatgtacaacgaattataaaaattaaattgttgctcaaagttacttgtatataagatataagtttatttttaaggtttaatataatattcatgataacttattttaaatcttagtttgcaatacaaacttaaaataatacataaatttatctttcaataagtttataagtttgattttttatgtaaatgaacatgttcaatatttaaaagataaataaatatatatttaaaaagataaaaccctaaaaaacattaatataataacaatattaccaagaaatatcatttatttttccttaaatagataaattaattaaacactagagttaacctagtagtaggagttgaggtaaatgtataaatctgataaataaataaattaaaagaggtaaatgtataaagacttaagttggatttttattgtgattgtaaaaaaaaaaattataaacacattaagttttttctactgcataaactcgttaagtttaaaagtcttttttaataatttaaattccaaagtctttcatttttaattaaatagtcttttaataaaaaatgtgacctcagttatttaataaaataccttacttaaccgagatttaacataggttagaacaaaagtcatattgatacgacctgaccaattaattataaattctaataaatgttgaagatcaactttgattttaaaagcttctaagtttattttgttatcttaagtcttaacacttacgagtgtctttataactaattaaaaattatataaaacacaacgtcaaatacttaataccacacctacaagtactttttactttttgtctctttgataacaaagtacttaaaacttaaaagctaaggatggcaacctaaattttttaactttcacgtgttgagtagcaacattctatgcagctagcatttatgctttttagtgactggtattttagtttatccaatttataagaaatatttatttaatataactaaaattatatgtaataaataaataaatgctagtattatatttgtatatataaattataattatttataataaataaatattttaacaaaaaaatatttaaaatgtgtaagaaataatttatactgtgataaaatgttatttaaaactatttatattttttttacattttttaggaaattgatagttacttttaaaaaaatattgaaattcaatttcaaaatcattaagccaagggactacaagatctaagccacaaatgtggatagtaagaccctctagtttgttgtctttgactagacgttattactttggtgcagtgataaaattacatatcactcacttcttaggagtcgatggtaagaataatttataaatatttttgtcccttaatccatccaagcgttttttagtgacaaaaccataaaattcatgcgactcaaagcaaaaaataacttgaatacaatgaacctattgtttgatataattattctagtgtttatataaagacgataaaattgtatccaagagggaagtcaatattattagttttatagattattttttttcaaagccaacaagttgccatgcacttgtcatcatattgtaatttttattttggttaattcttatatattttagtaattatgataatctaaaatcatacaataatcatttaatatttggtgacgggcttgaaattcaatttggttttcacacttcattgacagaaagaggaggagaatttatagattgatgggttaagataatgttttcaatcaacattttaatttttatttttatttttattttcttctaaactcttttacttatttcaatctctatttttgaaaccttatttttttaatttctatttatttttaaaacttttattattttaattcctacttattattattgtaattactatcaaaattattattaaaatttctatttgaactattatcaaaatactattaaaattataattcgagtcattattattgaaattcatcatttttttatttataatttgttataatgattgatctttaacactgatagaagtttaatacataggctcgtgacaaaggacctactaggaggataaaaggcatccaaaagaagaattatctcattcctctaatatacctatgagattatatttattaacaaaaatgaacacaaatttcataattaataatatatattttttaattttttattacatataccgaattaataagtaattcattaatttagtacctcaaccgaatggattaatggaacaattttcataacacctagtgagtatccacttttagtctttagtctctgtaattttttatttccttgtcatttttaactaataatagtaaggaaatgttgatggattggcaagtgcatcaatgcatcccaaatagtaaagttaaaagggaagtccaagtatcatatccacaagaactttatttgtacttaggtagataaatattaattaagaaaaagatttggaagagataatagaaaacagtaaattaaattgctgaaaattaaatcaaataaaaaaaattaaacatggattaattaaggacaaaaaagatgagaaaatctaatattattgtagaaggaaattcagaatatgagaatgttagaaatttagcctaccagagttactctttgatgtaatgttaatgatttttctctatttattatcattctaatttatatctgcatctactagtatactctaatttttgtctcccgcatgaaagagcttaatttatctattttttatcccaaattcctttgcagagctaaaatagtaaattgcattaacaatatagatgtgtaataggttaaacaaatattaatttatccctagtgatgactttatttagatatatactcttttccagttctattagaaaataacatttcccaatgctacccctaaaacttactatgcaaatgggtgatcaagccacaaacaataatattaaatacagggaaaaataatgcaaatgtaatattcataaataaacagaaagagaaattatatcaagaataattgactgtcaagatcccaacaaaggggatttagcctcttattataatgaagattttacaattgcaagaggagaatatttagtaaaggaaaaaagataagaaaagaaatgaagcggatgaatgactctcaatgtttatttttcctttttctaacttttgtcttctataaggaattgtattttcttgaaatttttgtgaatcttttctttcttctctttttttcttttataggtacaaattaacgagcttctgaattagtttgtttttcttaattagtcttatttttcttaattaatcttttttctctaattaaccctactttccttaattatctttacttttttggactttattttaatcattaaatatcataaaccacttttaatattttatgcacaaaaatttaaataatattaatttaacaatcatttactaaaaaaaatattataaattcttatataatttaacttcaagatatattgataattaaccgttatcacaaaacatctaattttcctctaccatcggaagtgttaaattaaatgaactataatagttatctcaatccacatgatgagataagacgtagccagcagcttataatttattgtcccatcccaaggaagtcgttgggtggacttagagcagcccaactcaactcgaaggcaaatccatttcggccacactatttttctcagctagttttgatgcaccacaagttgggtgagcacaagcttatttcagttggggaaaggaaaactctaggacattgccggatatctggaatcgaagctgcgcatgcattcttcataaagtgttttctcttttaagcattacactttttgtaaccatgtatatatcttctggagcatatatatcctccatttaaagaccattttttttataagtatcctctttcagaggcaatttgttcgagaccctctattaaacactaaatataaacacctacccaccaagtattcaatccttaattcgtgattgtgagggactaaagaagaccaccaatttattcccaataaaacacaaataaatataatcatttaaaatttatgtggagaacaagtcaatacttatttctttacaatgacagtgatataaaaaaaaatatatccaacatcaaattatactaaactagtaataacagtgacttttttttaccacattaaaaagaagaagaaaaagaagcagcaaagtcacatatatagggaacaaagtaactaggtcagaattgttttgtcaacgatacaaattaatatttcaaataagattcttttgatcatttctcttctctggtctctgttaattatccactttcacttggtatgcaaacgtttgtttatataagttacaacctactctagtacaaacctgtcattattttaaagctctttcttgtttttcgtatgtgatctaatacttacttcttattttcatacacagtatgataagtaattcgttgctatcnnnnnnnnnnnnnnnnnnnnnnnnnnnnnnnnnnnnnnnnnnnnnnnnnnnnnnnnnnnnnnnnnnnnnnnnnnnnnnnnnnnnnnnnnnnnnnnnnnnnnnnnnnnnnnnnnnnnnnnnnnnnnnnnnnnnnnnnnnnnnnnnnnnnnnnnnnnnnnnnnnnnnnnnnnnnnnnnnnnnnnnnnnnnngtagtgcagtttgtaactcgatgtctgtggcacctaattaggtcatcaaaacatgtttcatttcataacaaaaggagcatgaatatttgtatgtgattgaggtcacacttgaaacacaaacagagacatttaataataataataataataataaataaataaataaataaaaacatgtcagccagtcgatcaccaagcccggctatggcaacataaaaaaaattctgcaaatccttaatcgtaaatttgcacaagcatagcttaatctcatatatatcatattgaacaattagtgttgatgatatccgatcttaaatatggactaatcttcaccccacaaagattgttgttatgaaatatctctactccttgaggtgctaaaacgcagcaagtaatgagcaggtaaattaggtttcaaaaaaggaggtttacttgggttgaaaagtctgtccagaaactagtaaaaaaaaaaatcaccaatttaacgtttacgctatgccttttttctctctctttcgtatgcatcaatcgtagaataatgtcactaatccttgaattgggttagagtagtaaaatacagtgaagagactagaaagtgttagttacatatattcaggttttttcttacagacgatgtagtcaattattgttaatctcaatgtaaacaaacatgatgtggatcagtatgaattattgaagtcaaccataaaaaaaatgaagtatacattatcatcgacaggtaatatttgaattgggcgctgaaccaaacggctattgtcaattgggcgtgggaaatggtctaatggaaaagacagtttgcttatgaacgaaggtgaattaggtatacgaaaatggaagtttacatggaatgcgaggtcaatgcagaaactagttccaacgagcaacggctacttaacgtctatgctatatatacactattatatgaaaagtgctaatgttcctaatgcttgatttgacgctatcaactttatttattttgacattttaaatgaccaactagcacgatctcacatccatagtggctgcatgtttttttctaatgataatgataattgagaacaacttacaccaaatttcaaattcagctaaattaaacttttttctaacttcaaattaatttattgacttttgtttttataaaagttttctcttctaattttaaagtatataaactaatttaaacttataaaaaaattattaattttatttgttcttctttaacggatagtgtttaataataataataataataacaataataactacatgttttttgcggaaaaaaatactttcattttaataaattaattaattaattaaatacaatgccacatttttttataaagacaataataaagataaaaactatgacctcatgtatattagtcacatggttttatttttctataaaattctaatatcttgttataaaattattttttatacatttaaattttaacaacattatttttttaggcaattttaacaacaaggttgtcatgtttaattttaatcatttaatattatttattataaaccattgtaatttattcactttcatatacaaattttgttattttaccgtatttttttaaaaaattacactataatcatgtcaacctcgcataaatatgtatatatgatatatgcttcgcgcccaaactttgcgcctttggggatatattgaatagtatgtatcaaatcaaattaatagttaataatataagatttttattctgtcaaaagaaaaatataagatttttattaaagattggaatacggtgccgtacgttactagccaagcaagcaaaagctggatactgatacgatcagactgtgtagcacatggtttcactacgcgaacaaaattaatagacagcagtggatgccaggctggaagctgttgcacgggtgtgaacaacagataaataattttaaaaagagagaaatttttatatattaggtttaaaattatccagtcctgaataataaaatgtaattttaaatgaaagtatttttaattaaaacaaatgaaacattcaaatgaaataactgaagagttcttgcttcttattttaaaattataattatcaatcttctacctaaattcttaaacatttaaaaattgtgattcaaattgtagttagtccaattatcattttaattaattgtggcagtgataggtggtgactacagaagaatgataatggtggatggtgccgcgtgataggtggtgactaaagaagaatgacaatggtggatggtgccgggccactgatgagggtggaggagtcattgaagagacaaggagattaaaaagataaagttatgataaggagaatttataataagaatgtgtcttagattaatctaagagctctaaaaatggtgtttggtggtttttcacagtagaaattgactataaagagttcaaagattttaagcaatgattttaaatttaagaattattagcaacactttttgtcacattctttagaatttgtttccttagttaaaaattatgatattgaatagaaaaaatatgtatgcttcatatttaatttgaaaaggataagaagaaaatacaaatcaagcatatatacgagaacataaaagaatctataatttttgttaatcataaaataattttttgtctcgtacacaaagtatgaaaaacatgcatatatttttatttctatctatttaataacaaaaaaataataactaatcaacataatcattttaaaaagaaaacatcatattttctcaatataattttgtaattttcaatatattttaacaaattaaagaaaatgtatttaaaggaatgtattttcctttaaggttattgtacatggattaaaaattatttaatacagctaaaattggtaatatttagactaaaatgttattatttaatacctttatctttgatatttgcactattggtaatgggcattaaataaaagtatatttgagaaaaaaacattaattagactttgaaattttaaaacattaattgattttgaaaaaattagaaggataaaacataaaaaaaatatgcgaaaaagttagtataatttagaatatttattcatcttaaacaagagttgtcattcttcaatgaaaatatctttcattatttttctatgataatagtgtttttaaagatttttcttaacttcttatattcttcgatatgttattttcaatatttttaattttaaattgagttgagaaaataagttatacactaacaccataaaattgttttacacctttatcaaatcaataccattcagatatgcaaagttttacgaacttttatgataactaaataaaaatcatataacgatgatttgtaattgattaaactcaattatttttcaataattaaaaataacattatatcacaaaatatctatcataaatataaagtataaattataactttatttcttataatttttaatttttagttataatataatttatatattcaaaatatttatttattataattatataaaataaacatttattttgtgcaattcagatgctaaaatactagttgaacaataacttgattgatgataattaaatataccacaatactatatcatatattaaataataattttattttaaaatataaacttgtaattaatataaaatattttattatatattttaaaaataaatttataatacttaattaaataataaaaatacataatttttacgtgcaattcatttcaaaagtaaaactagaaaataaaaatgaaatatttttataaaataatattgattcaaaaagatttttatcactattttctattcagctttatcgtattttaaacaacttttatctccattaaagtttcaatggctaaacatctatccatgtggcaaatatgtattggtttgaccattctaggcagagcgcgcaacggtatcactctcacgctcacaattgccacagagtgtggttggaaaaatgatggaaagaagaaacagaaacaaatctttaataaataaataaaatgattaatttatttttaaaaaaaagtatcaataaaaaaatttaaaggacttatttgttttcagttttaaattaaaaaaaaaacattttactaagagtattttataattaaaaaaattaaaacatcacgatgctatttcaatttttttattattcatttttttctattgttccatctttttttttctcatttacactcttttgtttccttctaaattaatttttttataattattttaagaaataactttaaaaaaactcaaaatcaaaacctcaataaacactgaaagttatttttgtcccatttttatatataatctaatattataaaatttaaaataagaataaagtacttaaaatttatgaaatactttataacagtaagatagaattataaaacggatgtgaagttannnnnnnnnnnnnnnnnnnnnnnnnnnnnnnnnnnnnnnnnnnnnnnnnnnnnnnnnnnnnnnnnnnnnnnnnnnnnnnnnnnnnnnnnnnnnnnnnnnnnnnnnnnnnnnnnnnnnnnnnnnnnnnnnnnnnnnnnnnnnnnnnnnnnnnnnnnnnnnnnnnnnnnnnnnnnnnnnnnnnnnnnnnnnnnnnnnnnnnnnnnnnnnnnnnnnnnnnnnnnnnnnnnnnnnnnnnnnnnnnnnnnnnnnnnnnnnnnnnnnnnnnnnnnnnnnnnnnnnnnnnnnnnnnnnnnnnnnnnnnnnnnnnnnnnnnnnnnnnnnnnnnnnnnnnnnnnnnnnnnnnnnnnnnnnnnnnnnnnnnnnnnnnnnnnnnnnnnnnnnnnnnnnnnnnnnnnnnnnnnnnnnnnnnnnnnnnnnnnnnnnnnnnnnnnnnnnnnnnnnnnnnnnnnnnnnnnnnnnnnnnnnnnnnnnnnnnnnnnnnnnnnnnnnnnnnnnnnnnnnnnnnnnnnnnnnnnnnnnnnnnnnnnnnnnnnnnnnnnnnnnnnnnnnnnnnnnnnnnnnnnnnnnnnnnnnnnnnnnnnnnnnnnnnnnnnnnnnnnnnnnnnnnnnnnnnnnnnnnnnnnnnnnnnnnnnnnnnnnnnnnnnnnnnnnnnnnnnnnnnnnnnnnnnnnnnnnnnnnnnnnnnnnnnnnnnnnnnnnnnnnnnnnnnnnnnnnnnnnnnnnnnnnnnnnnnnnnnnnnnnnnnnnnnnnnnnnnnnnnnnnnnnnnnnnnnnnnnnnnnnnnnnnnnnnnnnnnnnnnnnnnnnnnnnnnnnnnnnnnnnnnnnnnnnnnnnnnnnnnnnnnnnnnnnnnnnnnnnnnnnnnnnnnnnnnnnnnnnnnnnnnnnnnnnnnnnnnnnnnnnnnnnnnnnnnnnnnnnnnnnnnnnnnnnnnnnnnnnnnnnnnnnnnnnnnnnnnnnnnnnnnnnnnnnnnnnnnnnnnnnnnnnnnnnnnnnnnnnnnnnnnnnnnnnnnnnnnnnnnnnnnnnnnnnnnnnnnnnnnnnnnnnnnnnnnnnnnnnnnnnnnnnnnnnnnnnnnnnnnnnnnnnnnnnnnnnnnnnnnnnnnnnnnnnnnnnnnnnnnnnnnnnnnnnnnnnnnnnnnnnnnnnnnnnnnnnnnnnnnnnnnnnnnnnnnnnnnnnnnnnnnnnnnnnnnnnnnnnnnnnnnnnnnnnnnnnnnnnnnnnnnnnnnnnnnnnnnnnnnnnnnnnnnnnnnnnnnnnnnnnnnnnnnnnnnnnnnnnnnnnnnnnnnnnnnnnnnnnnnnnnnnnnnnnnnnnnnnnnnnnnnnnnnnnnnnnnnnnnnnnnnnnnnnnnnnnnnnnnnnnnnnnnnnnnnnnnnnnnnnnnnnnnnnnnnnnnnnnnnnnnnnnnnnnnnnnnnnnnnnnnnnnnnnnnnnnnnnnnnnnnnnnnnnnnnnnnnnnnnnnnnnnnnnnnnnnnnnnnnnnnnnnnnnnnnnnnnnnnnnnnnnnnnnnnnnnnnnnnnnnnnnnnnnnnnnnnnnnnnnnnnnnnnnnnnnnnnnnnnnnnnnnnnnnnnnnnnnnnnnnnnnnnnnnnnnnnnnnnnnnnnnnnnnnnnnnnnnnnnnnnnnnnnnnnnnnnnnnnnnnnnnnnnnnnnnnnnnnnnnnnnnnnnnnnnnnnnnnnnnnnnnnnnnnnnnnnnnnnnnnnnnnnnnnnnnnnnnnnnnnnnnnnnnnnnnnnnnnnnnnnnnnnnnnnnnnnnnnnnnnnnnnnnnnnnnnnnnnnnnnnnnnnnnnnnnnnnnnnnnnnnnnnnnnnnnnnnnnnnnnnnnnnnnnnnnnnnnnnnnnnnnnnnnnnnnnnnnnnnnnnnnnnnnnnnnnnnnnnnnnnnnnnnnnnnnnnnnnnnnnnnnnnnnnnnnnnnnnnnnnnnnnnnnnnnnnnnnnnnnnnnnnnnnnnnnnnnnnnnnnnnnnnnnnnnnnnnnnnnnnnnnnnnnnnnnnnnnnnnnnnnnnnnnnnnnnnnnnnnnnnnnnnnnnnnnnnnnnnnnnnnnnnnnnnnnnnnnnnnnnnnnnnnnnnnnnnnnnnnnnnnnnnnnnnnnnnnnnnnnnnnnnnnnnnnnnnnnnnnnnnnnnnnnnnnnnnnnnnnnnnnnnnnnnnnnnnnnnnnnnnnnnnnnnnnnnnnnnnnnnnnnnnnnnnnnnnnnnnnnnnnnnnnnnnnnnnnnnnnnnnnnnnnnnnnnnnnnnnnnnnnnnnnnnnnnnnnnnnnnnnnnnnnnnnnnnnnnnnnnnnnnnnnnnnnnnnnnnnnnnnnnnnnnnnnnnnnnnnnnnnnnnnnnnnnnnnnnnnnnnnnnnnnnnnnnnnnnnnnnnnnnnnnnnnnnnnnnnnnnnnnnnnnnnnnnnnnnnnnnnnnnnnnnnnnnnnnnnnnnnnnnnnnnnnnnnnnnnnnnnnnnnnnnnnnnnnnnnnnnnnnnnnnnnnnnnnnnnnnnnnnnnnnnnnnnnnnnnnnnnnnnnnnnnnnnnnnnnnnnnnnnnnnnnnnnnnnnnnnnnnnnnnnnnnnnnnnnnnnnnnnnnnnnnnnnnnnnnnnnnnnnnnnnnnnnnnnnnnnnnnnnnnnnnnnnnnnnnnnnnnnnnnnnnnnnnnnnnnnnnnnnnnnnnnnnnnnnnnnnnnnnnnnnnnnnnnnnnnnnnnnnnnnnnnnnnnnnnnnnnnnnnnnnnnnnnnnnnnnnnnnnnnnnnnnnnnnnnnnnnnnnnnnnnnnnnnnnnnnnnnnnnnnnnnnnnnnnnnnnnnnnnnnnnnnnnnnnnnnnnnnnnnnnnnnnnnnnnnnnnnnnnnnnnnnnnnnnnnnnnnnnnnnnnnnnnnnnnnnnnnnnnnnnnnnnnnnnnnnnnnnnnnnnnnnnnnnnnnnnnnnnnnnnnnnnnnnnnnnnnnnnnnnnnnnnnnnnnnnnnnnnnnnnnnnnnnnnnnnnnnnnnnnnnnnnnnnnnnnnnnnnnnnnnnnnnnnnnnnnnnnnnnnnnnnnnnnnnnnnnnnnnnnnnnnnnnnnnnnnnnnnnnnnnnnnnnnnnnnnnnnnnnnnnnnnnnnnnnnnnnnnnnnnnnnnnnnnnnnnnnnnnnnnnnnnnnnnnnnnnnnnnnnnnnnnnnnnnnnnnnnnnnnnnnnnnnnnnnnnnnnnnnnnnnnnnnnnnnnnnnnnnnnnnnnnnnnnnnnnnnnnnnnnnnnnnnnnnnnnnnnnnnnnnnnnnnnnnnnnnnnnnnnnnnnnnnnnnnnnnnnnnnnnnnnnnnnnnnnnnnnnnnnnnnnnnnnnnnnnnnnnnnnnnnnnnnnnnnnnnnnnnnnnnnnnnnnnnnnnnnnnnnnnnnnnnnnnnnnnnnnnnnnnnnnnnnnnnnnnnnnnnnnnnnnnnnnnnnnnnnnnnnnnnnnnnnnnnnnnnnnnnnnnnnnnnnnnnnnnnnnnnnnnnnnnnnnnnnnnnnnnnnnnnnnnnnnnnnnnnnnnnnnnnnnnnnnnnnnnnnnnnnnnnnnnnnnnnnnnnnnnnnnnnnnnnnnnnnnnnnnnnnnnnnnnnnnnnnnnnnnnnnnnnnnnnnnnnnnnnnnnnnnnnnnnnnnnnnnnnnnnnnnnnnnnnnnnnnnnnnnnnnnnnnnnnnnnnnnnnnnnnnnnnnnnnnnnnnnnnnnnnnnnnnnnnnnnnnnnnnnnnnnnnnnnnnnnnnnnnnnnnnnnnnnnnnnnnnnnnnnnnnnnnnnnnnnnnnnnnnnnnnnnnnnnnnnnnnnnnnnnnnnnnnnnnnnnnnnnnnnnnnnnnnnnnnnnnnnnnnnnnnnnnnnnnnnnnnnnnnnnnnnnnnnnnnnnnnnnnnnnnnnnnnnnnnnnnnnnnnnnnnnnnnnnnnnnnnnnnnnnnnnnnnnnnnnnnnnnnnnnnnnnnnnnnnnnnnnnnnnnnnnnnnnnnnnnnnnnnnnnnnnnnnnnnnnnnnnnnnnnnnnnnnnnnnnnnnnnnnnnnnnnnnnnnnnnnnnnnnnnnnnnnnnnnnnnnnnnnnnnnnnnnnnnnnnnnnnnnnnnnnnnnnnnnnnnnnnnnnnnnnnnnnnnnnnnnnnnnnnnnnnnnnnnnnnnnnnnnnnnnnnnnnnnnnnnnnnnnnnnnnnnnnnnnnnnnnnnnnnnnnnnnnnnnnnnnnnnnnnnnnnnnnnnnnnnnnnnnnnnnnnnnnnnnnnnnnnnnnnnnnnnnnnnnnnnnnnnnnnnnnnnnnnnnnnnnnnnnnnnnnnnnnnnnnnnnnnnnnnnnnnnnnnnnnnnnnnnnnnnnnnnnnnnnnnnnnnnnnnnnnnnnnnnnnnnnnnnnnnnnnnnnnnnnnnnnnnnnnnnnnnnnnnnnnnnnnnnnnnnnnnnnnnnnnnnnnnnnnnnnnnnnnnnnnnnnnnnnnnnnnnnnnnnnnnnnnnnnnnnnnnnnnnnnnnnnnnnnnnnnnnnnnnnnnnnnnnnnnnnnnnnnnnnnnnnnnnnnnnnnnnnnnnnnnnnnnnnnnnnnnnnnnnnnnnnnnnnnnnnnnnnnnnnnnnnnnnnnnnnnnnnnnnnnnnnnnnnnnnnnnnnnnnnnnnnnnnnnnnnnnnnnnnnnnnnnnnnnnnnnnnnnnnnnnnnnnnnnnnnnnnnnnnnnnnnnnnnnnnnnnnnnnnnnnnnnnnnnnnnnnnnnnnnnnnnnnnnnnnnnnnnnnnnnnnnnnnnnnnnnnnnnnnnnnnnnnnnnnnnnnnnnnnnnnnnnnnnnnnnnnnnnnnnnnnnnnnnnnnnnnnnnnnnnnnnnnnnnnnnnnnnnnnnnnnnnnnnnnnnnnnnnnnnnnnnnnnnnnnnnnnnnnnnnnnnnnnnnnnnnnnnnnnnnnnnnnnnnnnnnnnnnnnnnnnnnnnnnnnnnnnnnnnnnnnnnnnnnnnnnnnnnnnnnnnnnnnnnnnnnnnnnnnnnnnnnnnnnnnnnnnnnnnnnnnnnnnnnnnnnnnnnnnnnnnnnnnnnnnnnnnnnnnnnnnnnnnnnnnnnnnnnnnnnnnnnnnnnnnnnnnnnnnnnnnnnnnnnnnnnnnnnnnnnnnnnnnnnnnnnnnnnnnnnnnnnnnnnnnnnnnnnnnnnnnnnnnnnnnnnnnnnnnnnnnnnnnnnnnnnnnnnnnnnnnnnnnnnnnnnnnnnnnnnnnnnnnnnnnnnnnnnnnnnnnnnnnnnnnnnnnnnnnnnnnnnnnnnnnnnnnnnnnnnnnnnnnnnnnnnnnnnnnnnnnnnnnnnnnnnnnnnnnnnnnnnnnnnnnnnnnnnnnnnnnnnnnnnnnnnnnnnnnnnnnnnnnnnnnnnnnnnnnnnnnnnnnnnnnnnnnnnnnnnnnnnnnnnnnnnnnnnnnnnnnnnnnnnnnnnnnnnnnnnnnnnnnnnnnnnnnnnnnnnnnnnnnnnnnnnnnnnnnnnnnnnnnnnnnnnnnnnnnnnnnnnnnnnnnnnnnnnnnnnnnnnnnnnnnnnnnnnnnnnnnnnnnnnnnnnnnnnnnnnnnnnnnnnnnnnnnnnnnnnnnnnnnnnnnnnnnnnnnnnnnnnnnnnnnnnnnnnnnnnnnnnnnnnnnnnnnnnnnnnnnnnnnnnnnnnnnnnnnnnnnnnnnnnnnnnnnnnnnnnnnnnnnnnnnnnnnnnnnnnnnnnnnnnnnnnnnnnnnnnnnnnnnnnnnnnnnnnnnnnnnnnnnnnnnnnnnnnnnnnnnnnnnnnnnnnnnnnnnnnnnnnnnnnnnnnnnnnnnnnnnnnnnnnnnnnnnnnnnnnnnnnnnnnnnnnnnnnnnnnnnnnnnnnnnnnnnnnnnnnnnnnnnnnnnnnnnnnnnnnnnnnnnnnnnnnnnnnnnnnnnnnnnnnnnnnnnnnnnnnnnnnnnnnnnnnnnnnnnnnnnnnnnnnnnnnnnnnnnnnnnnnnnnnnnnnnnnnnnnnnnnnnnnnnnnnnnnnnnnnnnnnnnnnnnnnnnnnnnnnnnnnnnnnnnnnnnnnnnnnnnnnnnnnnnnnnnnnnnnnnnnnnnnnnnnnnnnnnnnnnnnnnnnnnnnnnnnnnnnnnnnnnnnnnnnnnnnnnnnnnnnnnnnnnnnnnnnnnnnnnnnnnnnnnnnnnnnnnnnnnnnnnnnnnnnnnnnnnnnnnnnnnnnnnnnnnnnnnnnnnnnnnnnnnnnnnnnnnnnnnnnnnnnnnnnnnnnnnnnnnnnnnnnnnnnnnnnnnnnnnnnnnnnnnnnnnnnnnnnnnnnnnnnnnnnnnnnnnnnnnnnnnnnnnnnnnnnnnnnnnnnnnnnnnnnnnnnnnnnnnnnnnnnnnnnnnnnnnnnnnnnnnnnnnnnnnnnnnnnnnnnnnnnnnnnnnnnnnnnnnnnnnnnnnnnnnnnnnnnnnnnnnnnnnnnnnnnnnnnnnnnnnnnnnnnnnnnnnnnnnnnnnnnnnnnnnnnnnnnnnnnnnnnnnnnnnnnnnnnnnnnnnnnnnnnnnnnnnnnnnnnnnnnnnnnnnnnnnnnnnnnnnnnnnnnnnnnnnnnnnnnnnnnnnnnnnnnnnnnnnnnnnnnnnnnnnnnnnnnnnnnnnnnnnnnnnnnnnnnnnnnnnnnnnnnnnnnnnnnnnnnnnnnnnnnnnnnnnnnnnnnnnnnnnnnnnnnnnnnnnnnnnnnnnnnnnnnnnnnnnnnnnnnnnnnnnnnnnnnnnnnnnnnnnnnnnnnnnnnnnnnnnnnnnnnnnnnnnnnnnnnnnnnnnnnnnnnnnnnnnnnnnnnnnnnnnnnnnnnnnnnnnnnnnnnnnnnnnnnnnnnnnnnnnnnnnnnnnnnnnnnnnnnnnnnnnnnnnnnnnnnnnnnnnnnnnnnnnnnnnnnnnnnnnnnnnnnnnnnnnnnnnnnnnnnnnnnnnnnnnnnnnnnnnnnnnnnnnnnnnnnnnnnnnnnnnnnnnnnnnnnnnnnnnnnnnnnnnnnnnnnnnnnnnnnnnnnnnnnnnnnnnnnnnnnnnnnnnnnnnnnnnnnnnnnnnnnnnnnnnnnnnnnnnnnnnnnnnnnnnnnnnnnnnnnnnnnnnnnnnnnnnnnnnnnnnnnnnnnnnnnnnnnnnnnnnnnnnnnnnnnnnnnnnnnnnnnnnnnnnnnnnnnnnnnnnnnnnnnnnnnnnnnnnnnnnnnnnnnnnnnnnnnnnnnnnnnnnnnnnnnnnnnnnnnnnnnnnnnnnnnnnnnnnnnnnnnnnnnnnnnnnnnnnnnnnnnnnnnnnnnnnnnnnnnnnnnnnnnnnnnnnnnnnnnnnnnnnnnnnnnnnnnnnnnnnnnnnnnnnnnnnnnnnnnnnnnnnnnnnnnnnnnnnnnnnnnnnnnnnnnnnnnnnnnnnnnnnnnnnnnnnnnnnnnnnnnnnnnnnnnnnnnnnnnnnnnnnnnnnnnnnnnnnnnnnnnnnnnnnnnnnnnnnnnnnnnnnnnnnnnnnnnnnnnnnnnnnnnnnnnnnnnnnnnnnnnnnnnnnnnnnnnnnnnnnnnnnnnnnnnnnnnnnnnnnnnnnnnnnnnnnnnnnnnnnnnnnnnnnnnnnnnnnnnnnnnnnnnnnnnnnnnnnnnnnnnnnnnnnnnnnnnnnnnnnnnnnnnnnnnnnnnnnnnnnnnnnnnnnnnnnnnnnnnnnnnnnnnnnnnnnnnnnnnnnnnnnnnnnnnnnnnnnnnnnnnnnnnnnnnnnnnnnnnnnnnnnnnnnnnnnnnnnnnnnnnnnnnnnnnnnnnnnnnnnnnnnnnnnnnnnnnnnnnnnnnnnnnnnnnnnnnnnnnnnnnnnnnnnnnnnnnnnnnnnnnnnnnnnnnnnnnnnnnnnnnnnnnnnnnnnnnnnnnnnnnnnnnnnnnnnnnnnnnnnnnnnnnnnnnnnnnnnnnnnnnnnnnnnnnnnnnnnnnnnnnnnnnnnnnnnnnnnnnnnnnnnnnnnnnnnnnnnnnnnnnnnnnnnnnnnnnnnnnnnnnnnnnnnnnnnnnnnnnnnnnnnnnnnnnnnnnnnnnnnnnnnnnnnnnnnnnnnnnnnnnnnnnnnnnnnnnnnnnnnnnnnnnnnnnnnnnnnnnnnnnnnnnnnnnnnnnnnnnnnnnnnnnnnnnnnnnnnnnnnnnnnnnnnnnnnnnnnnnnnnnnnnnnnnnnnnnnnnnnnnnnnnnnnnnnnnnnnnnnnnnnnnnnnnnnnnnnnnnnnnnnnnnnnnnnnnnnnnnnnnnnnnnnnnnnnnnnnnnnnnnnnnnnnnnnnnnnnnnnnnnnnnnnnnnnnnnnnnnnnnnnnnnnnnnnnnnnnnnnnnnnnnnnnnnnnnnnnnnnnnnnnnnnnnnnnnnnnnnnnnnnnnnnnnnnnnnnnnnnnnnnnnnnnnnnnnnnnnnnnnnnnnnnnnnnnnnnnnnnnnnnnnnnnnnnnnnnnnnnnnnnnnnnnnnnnnnnnnnnnnnnnnnnnnnnnnnnnnnnnnnnnnnnnnnnnnnnnnnnnnnnnnnnnnnnnnnnnnnnnnnnnnnnnnnnnnnnnnnnnnnnnnnnnnnnnnnnnnnnnnnnnnnnnnnnnnnnnnnnnnnnnnnnnnnnnnnnnnnnnnnnnnnnnnnnnnnnnnnnnnnnnnnnnnnnnnnnnnnnnnnnnnnnnnnnnnnnnnnnnnnnnnnnnnnnnnnnnnnnnnnnnnnnnnnnnnnnnnnnnnnnnnnnnnnnnnnnnnnnnnnnnnnnnnnnnnnnnnnnnnnnnnnnnnnnnnnnnnnnnnnnnnnnnnnnnnnnnnnnnnnnnnnnnnnnnnnnnnnnnnnnnnnnnnnnnnnnnnnnnnnnnnnnnnnnnnnnnnnnnnnnnnnnnnnnnnnnnnnnnnnnnnnnnnnnnnnnnnnnnnnnnnnnnnnnnnnnnnnnnnnnnnnnnnnnnnnnnnnnnnnnnnnnnnnnnnnnnnnnnnnnnnnnnnnnnnnnnnnnnnnnnnnnnnnnnnnnnnnnnnnnnnnnnnnnnnnnnnnnnnnnnnnnnnnnnnnnnnnnnnnnnnnnnnnnnnnnnnnnnnnnnnnnnnnnnnnnnnnnnnnnnnnnnnnnnnnnnnnnnnnnnnnnnnnnnnnnnnnnnnnnnnnnnnnnnnnnnnnnnnnnnnnnnnnnnnnnnnnnnnnnnnnnnnnnnnnnnnnnnnnnnnnnnnnnnnnnnnnnnnnnnnnnnnnnnnnnnnnnnnnnnnnnnnnnnnnnnnnnnnnnnnnnnnnnnnnnnnnnnnnnnnnnnnnnnnnnnnnnnnnnnnnnnnnnnnnnnnnnnnnnnnnnnnnnnnnnnnnnnnnnnnnnnnnnnnnnnnnnnnnnnnnnnnnnnnnnnnnnnnnnnnnnnnnnnnnnnnnnnnnnnnnnnnnnnnnnnnnnnnnnnnnnnnnnnnnnnnnnnnnnnnnnnnnnnnnnnnnnnnnnnnnnnnnnnnnnnnnnnnnnnnnnnnnnnnnnnnnnnnnnnnnnnnnnnnnnnnnnnnnnnnnnnnnnnnnnnnnnnnnnnnnnnnnnnnnnnnnnnnnnnnnnnnnnnnnnnnnnnnnnnnnnnnnnnnnnnnnnnnnnnnnnnnnnnnnnnnnnnnnnnnnnnnnnnnnnnnnnnnnnnnnnnnnnnnnnnnnnnnnnnnnnnnnnnnnnnnnnnnnnnnnnnnnnnnnnnnnnnnnnnnnnnnnnnnnnnnnnnnnnnnnnnnnnnnnnnnnnnnnnnnnnnnnnnnnnnnnnnnnnnnnnnnnnnnnnnnnnnnnnnnnnnnnnnnnnnnnnnnnnnnnnnnnnnnnnnnnnnnnnnnnnnnnnnnnnnnnnnnnnnnnnnnnnnnnnnnnnnnnnnnnnnnnnnnnnnnnnnnnnnnnnnnnnnnnnnnnnnnnnnnnnnnnnnnnnnnnnnnnnnnnnnnnnnnnnnnnnnnnnnnnnnnnnnnnnnnnnnnnnnnnnnnnnnnnnnnnnnnnnnnnnnnnnnnnnnnnnnnnnnnnnnnnnnnnnnnnnnnnnnnnnnnnnnnnnnnnnnnnnnnnnnnnnnnnnnnnnnnnnnnnnnnnnnnnnnnnnnnnnnnnnnnnnnnnnnnnnnnnnnnnnnnnnnnnnnnnnnnnnnnnnnnnnnnatattcaggaacaattttttacaattgatgtaactgttaccataagatactcaaggtgcatcctaagcattacaccatgaggttgacctaactttgagataaagtgaaagcatgcatccttgttaccttgatggggtcgttgtcatatgaaaaaggggtccatatggagggtacaatactaattcttaaattcttatagccaagaacatgtttttctcaagtttctcggtgggagaatatcagtttgtcctctgtgtaaagctctcaattcaagttagtccaattcatttgagttatttgtactataagaataaaggtaaaatatcaatacaaaaaaaaaacgtaaaatatagtaataactgtaaaaaaataaagtgtttcaaatgaatgttgtaaattaagaaaaattctatcccaaatattaaccttaaaataacatgtaataagataaagtactatttggattagattgaatgactcgatttttccgagacatccttacataggttcattactagatttatttctagcggcttttttcctaaaaggggtaaatatttttattattttccgaccgaaaatatattttaaaaaattattcaaagggattgagtcataataaatgttatgattttttatttttgttaattaaagtcgtaaaattatttataatttagttattttttttttatgattttgaagttgtaagaattttttattttattttttggtaactttgaagttgtaaaccacttttttgttttttataaatgtttaagttatttattttttaaatttataattttttatggttttttataattttttaaaaattatttaaatgcataataaatagtattaacttgatttattattagtatatttttatgattttattttatatgttcttaatttttttaatatttaattatttaaaacatgttatatatttttaatattattttatttaaatatttttgtttatttaattgatttttattatatttttattttattttcataacacttcatcacttaataaaaagacatcactgatggagactattttttataatcacaaattcttaagggaccaatttttccaaaaaatagtttagaaatcaaaaattaaaaatctcatatttttgaggattaaaaacttaattaacactaaatttttttatactattaaaaagaattcatcatttttttttgtatttcaaaaggtaaaaagaattattaaaagatgtgtttatattttgaagaataatatgatatatttttattagctaaaatttatggtattaaacaagatgaatatttttatttcaaatttaatttaaaaaaattatgggacaacctaaattcatcaattgatcaattgaggactgcaaaaaaaaaaaaaaaaaacttgacttcttattagtcagaaaattataacacaattttttattctacacaccaagtatttaaaagatacacatatctcaacttattttttattattcgaactttatctattatctattagccgcaacaagtatatcatgttatatattttgaatccttataaaattaataataataaaaattatattaagataattaatatttttttaataaattttatatgattttactctgtaatgtaatgtgcatttctaatgaaacgcaaccttaatgtgaataaagaataaatattgttggtgactgacacagttacagtgatagtagtataattgtaaagcgtggcgagagagtatagtgagttgggacagctggtccttggacaacaacgcaaggcttttccatttccattccataaataatgagagaagaaaggtattttgatttttatctttaattaattaaattaggtagcaaattaataaattattaaagctaatataaaatgtggcctcttaaaagttataattgtgttctggggccgtgaaacatttctatggtggaaattgctatgctatgctaagctaagctggaaagaaaaaaggccctctgagtgagtgagagtgtgtggttaaagaggagaggaagaagagaagaggaggcggtgcgcaccttagcatggattcctctccgtcatcttctctctcctctctcgcttcgtccccacggcaccatcgtcctctctccaattgagaaaggcaccgattcccattctcattctcactctggctgacataaaggcaacccttgcctctctctcttccatcgatttcaatttctacggcaacaggaaaagcaagaagaagaaggccaggctctgctttggtttccgccgcgtcaaaatgctgtggctgatgagattctcgggcttcttctccgccgcaatgctcgtcattctcctctccccctccctccaatccttccaccccgccgaagccatccgctcctcccaccatctcgacggcctcctccgcctccctccgccgcgcctctccttccgccccgccgctccattccgcaatgccgccgacggtaaatgcgcctcctccgttcccacctccgtctgcgacccctccctcgtccacgtggccatcaccctcgacgtggagtacctccgcggctccatcgccgccgtccactccatcctccaacactcccagtgcccggagaacatcttcttccacttcctcgtctccgaaaccaacctcgaatccctcgtcaaatccaccttcccgcaattgaacttcaaggtctattacttcgatccagagatcgtccgcaacctgatctccacctccgtcagacaagccctcgaacaacccctcaactacgccagaaattacctcgctgacctcctcgaaccctgcgtcgagagggttatatacctcgactccgatctggttctcgtcgacgacattgccaagctctggagcaccagtctaggttctagaaccattggcgcccccgagtactgccacgccaacttcaccaagtacttcaccgcagggttctggtcggacatgcgcttcgccagcgcgttcgcggggcggaggccgtgctatttcaacacgggcgtgatggtcatagatctggtgcggtggcggaaaatcgggtacagcaagaggatagagaggtggatggagattcagaagaacgatcggatctacgagctgggttctttgccgccgtttctgttggtgttcgcgggacgcgtggcgccaattgagcacaggtggaaccagcatgggttgggtggcgataacgtgaaggggagttgccgggacctgcacgctgggcctgtgagcctgttgcattggtccggtagtggcaagccctggacaagattggactccaagcacccctgtcctcttgatgcactttgggctccttatgatttgtacggacacgctcactgattagcctttgccttctccctgctcgccggtaaattcccttctctgtcacttctgttcatttaatttaattctcattccgcccaatttttattttttcttattattttcttccctcttctcttctctttactatcaacagacagatcagatattttacttcacccatttttattagtcttcgttacccaggccatttgtattctacagtatcttctattttgtgcttcgtgctctggaaataaataagataataaaataaaggaatgggtggatcttctattttcttcttgtacgtatttcaagtatgaactaagcttatgcttaactttctgtatggtgtaaagtatatggacattaggatataataattgtgctttattaagaaatgcgttaatttaaatgaaccctgcaaatgtagtcacttcttaatagtattaattttgatttttttttatttttttttgtgttaatggctggtgtggtatctatctggattattattgggaatttggtcttatttcatgaatgaatttgattgtgttcaccagccaagcggtacaaaccgaactacgaatttagtacctaggtgagtgaggtaggtgggttgcggtagcacatgtgcaaaaattttgtgtttgtacttctaaatactattgttcaaataaatcacacagtatgtgtttgtattgggaaattggtaccgcaacttggcgctgcttgctaatgtaagcaaagatgagaatgagaagctgaactgttgtgttatgcattctggttctagatgttatttttagttaataatgtaacaaggaggaggaggaagacacgtatattgatgggcagctactttagttgtacacgtttacagataatagagagagaagccaaaatgaacagcgaagctagctagcttaagaagtttaagatagccaaatgaggcatgaaaaacaatccaatgagtatgtggattgcgttggctctcgcggaatctctttaggctaagcagtgcttcggtggcagcggcggaacacttgtgagctatcgtacccatacatacggtcgctctcgccctctctcattttgtccttttcgccgcactgcatatttgccaattcttgatttctcatcgatttccccccacaaataaactcaagtgtcgatactctgggttaatgttgttttatttgaaagataaacacatttaaagagttaattattatgagagcttaggtaggaggttgaacaaatcaagttcaatggttatgttatgtgggttgacagatcctgatgtcaccgttgcttgtaggtgtctgcttgatgagagggtgcggggaccgatttctctcactctcacacgtagtcagttacttggactcttctatgtagttcggccctccatgtgttcgttatgtgcttttttaaatttaatttatttcttcaaataggtattcgagaacagaatagaagaagccattgtgaatagtacatgtgatcggttagaatggaggctatcctttaattgtttctttttttttttttttgtcacaaattgtatatgatttagattaggttgtgaataatctatccaaattatgcatatgtgagcaacgacgttggcttttagcattgctactctagctggggctatatatacttggattatgaattaaactatggaaaaaaagttctattgtcgggtttaagataatatactacgattaagacgtagcaacgaatgcttgggcgggcctatgatacattgtatgggcaaatgctgaaagttcaatattttgatattgacatatttattgccacgattattataataaaaaattgtgtaactttttgtttttttaataaaggttaaattactttttttttgtttttttaccattcgtatcttttagtagttttgaaagtaatttttttagttcttataatttatatttgaattttcttttaatttttatagtttaatagtgatatttttaattcttatagttcatattttaattctctttagttttcataatttggaagtgatttttttagtctttataatttatatttgaattccttttcagtctttattaaaaatatatatatataaataattaactacaaattagttataaattatctaatatttttttattataaattattttgtaataaattagttatcaattatttgttaatgtttgtgtagttaattctaattgataatattatttatattttgatggtaaagaaaattaaaatacaaaatataaggattaaaaagatcatttttaaactatagagactaagagaatttaaaaataaattataaggactaaaaaaattatttttaaactacagaaattaaaataattaaaatgtaaattataggaactaaaaagatcattttaaaattataaggactaaaatgtataaatgatgacactatagggaccggaattaaatttttaataaatttgatttaatagtatttgttttgaggggagttagaaatatggagacggagacggaaggctgggacagagatgaggcgaagcgaaagacagggcaggggcagctaacggcatagcctggacttcattgccttgaaattgattatttagctaagtcggaattctagttgaattattcgatttctagattttattattttatgtttttgtctcttagcacttgcaatgtcttcatctgaatgaagcgtactaaattactctttaaaaaactggttgtcagcgagtgggtaaaagtagttaattcatgtggatggaattggaacttgattcagttttcaatactaatacgcagatcttttcatgaagatttatattgcaaaccagttgaagacaaataaaactagctcattgtgtgcaaaacttgcccatagccaatttgaatcagccggtctcatctcctcgtggtatatttgttcttggttttggttttcctttgttcagaagtcatatcataggatggtatctaaatggcaaattaacaacgatacaaaattaaaaacgttatttgggcccttggaagaaggatatattttacctaggcctatttcaagtaggtccttgtctcaacgctcaagttggtgccgaagaaggttccatcaatcattacttgctcagaataaaattaacaaatactaattaggtaagctgtcggtgatggaaccttgtttttttgcgagcacgcttacagaagatcctattttgtaatctaaatttcttatagccttacgggtaatccataacttcatacgcaattatatatatggagaaaaaaaaaaaactcgttattgatcatctgtaatgcatatgaagtctaccaattctgtccctctaaatgaggttacaaggaaggcaattcaacaatcctcctagcaattctctaaagtctaaaccattatcttcatcttgacgaggatgctttaaccaatttctttatggaatgtttaaaatagtaaaacacttaactacaggtacgataattaaaaccacagaaagggagtttgtaaaaatgagcaacttttttttatttaaataaatttcttgtttttattttttggttacgctcatgacatcaggactgagttgttgggggatgacttttgttatgctatgtttgaatggaaaaaaaaatgtttattggatggataaagaagagagaaaaaaagaaatataaaaatttgtccgtgctttatttacatggatggaaaaagtgagtgtgaaaaagaaaagaatatgtataagatagttttttctttatggtcccacatgaagaaaaaaaatcccactctcctggtttctatgcattaccagataagtgaaaagggattttttttaattaatctctattttatgtattactttccatcccagttcaatattaaaaaattcacagcccctagggtgtatacaaattttaaaaggaaacaaaataataaataaatataaggagtaatataataaggaaaactaattgtaacgaaagaaaaaaaattcatgaatgattgacatttaagataaaatagtattttagtttgtaaaatacacaatataaatatttattttatataactaaattttaaaataaataaatagttttgaatatataaattatattataattaaattttataacaaataaatacttttgaatatacaaattatattctagatttgtgataaattatttatattgtgatacaaatttattttaaaattttggccatttaaaaattaatttgaaaataaataagatagattgaaagatataagaggttaaaaatttctaaaaatgttctcgttgaagaataattcttaaaaaaattgtcgttcaagatagttactataatttatgtagagaaattgaataatataactataatttgatagaaagaactatctttaaaaaggataaattagaataaaattaaggttcaaggtgtctatttataaaaatgataaagtttaaggatcaattagaataaaattaaaatttatggtgtctatttagaaataagataaagtttaattaaggataaatttaaataaaattaaagtttaaaatatttatttataagaaaataaagtttaaaggagttaaacactattttccctaacattaactatgatctcgattgtttaatctttgggtaaagaaattgaatttaagtttgtgatcataaaagaattacttattttgaactctcatgggaaagaagttggatacaaataatgatcaatgagtaacgatatataactatgctataatttatatatatatatttgacatttatttatttatttcatatttttttacatttttctttcttctctccttatctctttttgagtgtctataataacttataagtgtttatgcataatttttcatgatccatgtacaccaagactatgataattgacaagtaacatgcatgatatcacaaagcaaatataagagatagagagaaatctgacgtgtaaatgtcaatgaagtatttatacatgtccatatataccgtatattgttggaatttttagttttttagttcctattttttatattattctttttgttgtgattttgtgggaagtgagtttttgtatatgattttttttgtccaaattcattcatgttttgttgaactttgtgatggacaaaattctataacctcttcaataaaacacaccatcaaaaaatttgagcgggaaaactaaaattatcaaagctgaggaagattgatagcaatgcctcgagataggtatctctgaaaattatttttcttctctatttctattgtttgatatgaatttgttgcttttggttcaaactaatctatgtataaactttacatttagtatcagaacttgatttgtctttaccttgcttctgttttggcactcacattgttatttttttttgagatattaacactttatttttgaacgttttaattcatattaagcttgaaaatcatattggaatcaatttttttttatctgtgatttaaaatgataattttgattttgtaaatgattgaaaaccatccggtttccattcgggtttgtgggtcacaaccggatcaaaatgaaaggttgaagacaaatcaaaagagattttattttgttccatttcggtcgttttgatgctacatgacgcgggccattttttggaattacttgttgctttttagtgcctccatgtggctactagttttaataatattaaaatcgtacggtacataattgacgttgaaggccatgtttactttggccagctcaatgtggtttcttaaaccatttaaaggtttaataattaaaaaaaaaacttgtacgttgtctagccatataagttttatgtgaaataccttaatgtctttaattaataatttaatacgtacactttttactaaataattaaataacatatgctaaacattgtcttccctattccttttttaagataatacacacaataagtttgaacaagtgaggatctgaaaaactaaaactttgaagagtaaagagggttgataacacttattggaggtaggttcctctaacaattatttttcttctctgtttttcttgtttagtctagatgtgttgcttatggttggatattgtatagatgcttatattctggaaccacacacaatggttaagatcctagaatcagtcgcagatgtggtttcagagtctcaagcggtcatcataacacgaaggaaaggaacaaaagagcagcaaaggagaaagtacgaaagtatccaagaaatttagaagcgttctttggatccatttgcagctagaaaccatggtgtgagttaatttagggtggcagagcaggggaccataaaaattcggtggtccaccgaggttaattcttcttatttcttgcatgataggaagacccacatgcattgtatttacattttacatggttcaaacctccctctctagacaaacactgaaacacctcaatatcacaaccccttgttcacgtggaacatacctgtttgtgttgaaaaacacttgtgtaaactaaaatggactagggtttggggtgcccaagaaaggactccctccattgaaaacgctgttgagagtgtttgaatttctgcaggtgcgtgcagacctttacttttgataggtttttatgacaaaacatgaatgcttttgtccatggttgggccaaaaggctgaagttagcagttaatggaggagggtcctttctgatgtaaatgcagacctttcctcacccgtttgctgcaaagttttaactccaactattcaatgttgttgatttaatttccatatctttaattttgttgtgttggcgcttagcacatatgaggttatgactttggttacaagcttgatgaagttggattcttctaaacactatctaaggggtggatccctgtgcccctccccaaaaacaaaaaaacaaaaagatttcttgttccttgtttattatgtgtcacacacaaatttggggtcatggggtcttgtttgctatctattgatgtaacagagataggatggaagtatatagttcagaaatcaatagaagatgaagtgaaggagcttaccaatgggtggaaacaaaaaacagaaatcaaatatgctatttttaaattttactaatcttttttgtggtgtctctaaataaacaaggacaatgctagctagtgtcaggaaaatagaatgtttttatgtaaaaatacataaacaatttattctgatcttgatttttagtaaaaaaaataaacaaacatattgatgcaattctttacctatttctgtccacacagttgttagcagactcgttaaaaataagacaattctctaattaggactggataaagctttgcattgattgttaacatatatagattatggagatacaattataattctaattttaattagataacaatgttaagagtacctaagaatttttttaaaaaaattacaacagaaaatattatcattttaaaaatattttcgagatattattattcaatatggaaggaaaaggaaaggagacatcagacttaaattcccaaaaatcacgtttttgtgtattgccacttccattttagaaaaaaacaaacaaggttgtctccttcacgaccatgataggaggagggaccatctctgtaagatagatagacctcttaaaagggaccaatcaatcatcctccgttgagtgaccctaatcaatatcaccttagacaacattgaatacattcaaatatgactcatgagggaaatgctcattccacgtacgtaacacaaagaaagggtaatgctactatgtagagtaaggaatcttataaccgtacactctcgtgtaagcgtgatgtatatatagaagacatacgcacggtagattatttcgttagataattgcttttgtttttttagaccaaaggtatcctatatatatattgtaaacatttatatccgagtcagatagaattgaaaacttatctcttgacacaattgaatattcaaaacttaaattcaatatcattaatcatctcagttaattcatttgcttaatgatgaaaatttctcgtttaatactacttagtaatctcaaacatgttttgctgatagtgccactattttatggtgatacatgatgtctacatgcattacatgagcatgagctgaatggagattttactgaaagtggccacgtgaatcaaaacaaattaggatccaacattctcagtagttaattattctggtcccagctcttgtgcaatcaattcttatgataacggtgttgacttagaccatcagaaagtgactgtagtacaacttggaattggcttttgtttatgattaatcatctttaaaatttaaaaattctgaaaacgatgttaaatatgcaagtagtattgatgatatttcagttcaacctaacacacctaactgaatagaagcttcaatgtccacttattttctattgcacggggaagtagttattcgtgtatgttgatgatctagatgaaaccttgctatctcagcacttaaagaaggactacaacttatgatgccaaaagcccaaagcaaatcttgttgggaaatttccttacccactcatattttaataactatgttagttatatgttgagtgaattatattttaaatgatttatttgagtatgttatactataaaaaatgtgatatgaagttaatgagtgaacattattattagtccgactttgatataatggatacaatataatcatccgctcttttattgttaatgctgagtgttgcaaattttcaggatcatcaaagtgatcaacagttatacatctaagtttttttttttttttaatgaataaaaggactacagaacagcccaacagacagaaatattaattattagaagaaaacctaggaaaattcgcccctgaattaagcatcatcagctaatagctgtaaagaactatctaggtatttattttaatagggcctttaaaagtattattttaagatatatgtctataaatcttgtcttccacataaaaacaaataatattaaaataaaggtataattcaacaaatctcacatatatataattgctaaaaaatactaattaatcactctaaattatctaattctggagttttttctacaggaccaaaacattaagaaccatgattcgagacagaaatctccccctccaggtgaggatagacatttcaactgcaatgaggaagctaatttggtggctaatatttcataacaagagaaataatcagacacaagtatatttaatttttgaaatgacctcatcttttgcagaaatgcgtacgttggattatgctattgctttgttatattcttaatgcttaattttgttaacagtactaagttgctcttgagcatatgataggattattccatattttaagaaaagacatggacaataacttccttttccttttatattatggttagcagtaatggaaatccatgaacatcaaaggtagatgaattctaggttggatcataaaaagcatgtgtggccttcagagaagggttcatccaatttgtaaccagtcaaaacaacttccaaaggtatccacaaataaggtgctcttgttaaagatgtgggtgtagaaaatggaggactttttgttagatgtttttatctttttggatttaggattttctattagatgagacatgtttcatttttttatttaagactttctgcctcattttaacgtatgtctcattcttttggatttagaatattctattagatgtaaagacatgctttattcatgttattttgactattaatgacctcccatccacaatgtaatattttttaaaccttaaaggaaggtgtgtaatgtaaaaagaggtgtcagtttcatgattttcaaacttttaggagagatttgtgtagagataaaaaaaatactatgggtaatttgacaaaaaatcagaaaatatttgtgtaatttgttcaataaatattgttatatttctcattttatgaattaagactacttccactaacaagttttatgtgaattacttgtttatatttatagtttgtaatgtatcctcatgagccaacttgaagtcaacaaatattgttattggtaactcatgtgtgtatcacctatttagttgattcaccttaaactcattttgttaacaatgtcttacttctcgtaagagaaaatcattttaggcttaaaaaatctctttgatgcctataaatttagtttttaatttttattttattttgttttgattttatttggttaaagatttttttagtctttgttgtcaagtaataacattaaatgatggcttagcatgatattagtagtccattggcttgctacatcatcaaggagtataacaagataatcatgtttttttattttgtaaaatgtgtttttaaattctcatttgttcaaaatagttgattacgttagactagttaatgagatattagaaaacacattttaccaaaattattttacatgactgtcctatctgactccttgatggcatgacaagtcaaggttgatgctgcatcaattaacgttgttacttgataataggaaaaaaaacaaaaaaaaattaaatcttttagaagactaaaactatgtttggtaaaacatttcaactaacttctaactttttttacttgttgaaaagtttgtttggttgtttggtaaataagcttttttagtaatttctagggttttttgaaatgataaagtaacgttttttaaaatgttagcttctagtttgttatattttcttctatttttaacctcaatttatttatccatttttctaattatcctttttaaataaattatgaatttattatttttttcattttacactttacagttacttcaacagctaattttactgaacacttataatttaataaactagtttttctacttcatgatttttagctagttttgttaaacataacctaaaaagaaaagaactttaaaggactaaaatcaaagacatattattttagaaaaaaaatatgattttggtccctatattttcgtgaaatcttgtttctaatcttcgaagttttatatcatccaatttagtccttgcactttacaaaaacttgtttttaatcccttctcacaaaattctcctaaacgacattaacttttgtctgacgtgacaaataaagtgcattttctttcaaaaaaaatgattaaaatgacatggaaaattgtttagttttttaaaggaagttattaaaatgtctcttccaaacacattgaactgaaacttttaagggctccattttatggttgttttcattgtgattcttcaatagttattatagatttgttcttgcatcttcttttgattgtttgtttcttgaatgctactttcatgaatttgtacaataaataaacaatgtaatctatttgtcatggaagaaatgatatcaacatcatacgtgagaagagaccaaaaataagttttttttcttcatataaaatagatcgactttttgatacaaatataaggattaaaaacacaatttttcacttattttataggggtaaaaggttatttaactcatcatcttatttctccaaatcagaaatcaccataaagttgtaatacaaaaatgggcctaatctcacttattcatggacctaacctcactcccccgccactaccttaaccatacataatgggcctatcaattgcagatttctttatacccatactcgttcacttggcataacttgctgtttgtgcgtggatgtgtacatccatttatgtagatgtacaaactgtaatagccatggtatgtatgcagatgaaagacattatctttcaattggagcaaatatggtagctgcttcaggtgttggagctgcagctgtcgttgctacaaatccgctttgggttgtgaagactagatagcaagtgtgtttcttttcagttcatgctaaatcttttgcctatgctatcaacttatcatataaaattggcctgattcatgagtgcattaaatgcttagaatatatgcaatagtggtttgttaaagttaaaaacacttttattggattgcttagtttatcgtcaatgtcttggactcttggcagtagatacttcagaattttattttctttatgaaattggcatataccattactagaactatttctcatcatcaattgagctggcaataaaggcaccataaatttgacattagtttgttggggttcagtgtaatatccatacaatatgacaaaaactatatccatattgaattggaaaaagaatgaactcataaaacagctagtttatatgcttttgccttgggcagaccatgttattactttaacagaagggatgtgtggacattgaagaaactgttgttagaagtatactttgtgtattgtatttacgatagaactacattactttctttaccctgccattctttggtgcacgtatgtgcatattttgcgcaataagtttgcttcctttgtttcttcagagtaggtgttgtacccaataggcgcacactatctgtcttaaagagaattgctcatgaggagagcattcaggggttatacaagttggaattgcatatatcatcaatttcattttctggtcaatgtataatgccttataattaaaaatttattgacatttgagatatcctttaccataaacgaggcattgtacctgctctaactgatatcaatcatgttgccatctagtttccaacatatgaaaaaataaaattttatttggcaaataaagttaattcaatggctgttctagttctttgcaacctcttgaaagtttcggcagttggttaatttaatcattattttgtgtcagataacacagcaatggataagcttagagcacatgacttcgcaattgcatcaccaatttccaaattttgtgtgtccatattgacatactcgtgagtcatgagtcatttagctaaatgatttagttttattgaagatattcatgttgcataatcatgtataatagtcatacttctaggtgcctagccttatgaatgaaatgaccttgtcattccaagaataaatttttaatgcttaatgcgaaaactatatccagcttcgttagacttaagagttgtctcaattgttttctaaactttaactattacttcaatagatcctcctgtagtcttgttcagctttcgtttggtcagtaacagtagatatgtggcaaaatctgatccatccaaatgtgttaatctagaccattgattaatttaaagttagattctaattttaatgaatattcaaatcttcctaattacaaatcttgatggtagttaatagattcatgtctttgatcaaacacatgagtctgcatgaaaggttcattaagaaaatggttaaagtttagagaataattgagattaactcaaagttcatgatgatattaattttacaaatgatccaaagtttgacggaattgaaaatacctttccctttagaataatattggtttcactgcatattgttagctataatattttgctcgaacgtattgagcttaattgttattattattttaataaatttcctttccttcattgtcaataaagtcatcatgccatatacctattggtttgagaaggataagcgaattccttattcctcatttcttttgtttgaggagacaaacaacaaatgtttttgtattgtgtatgcaggttgcgctaccgtaatcacattcaccagttttgaaatgatacaccattttcctatttcactttttccttctgacccacagccacatatttggatggatagagcatggtggttgtctatgatatgtagcagttgaatggttccaaaacatatgttagtatagccgactaatgtttcttttgattaaaatcccattctttgtcattcttaattgtttgtttatgtaaggtagatttccacatcatttgaaattgaacctacattacattgagtcgttttccctagtcaaatttctgcaaattgactggctttgtaggtgtggactgaagacttatctataacaataataaagacaatatccattttagtttctatttttttatcctctaactacatattataactgtttttatttttcccattttcttttcaatctttattctctctttttctttcaatgaaaatgcaagcatagagtgtcttcctttcactagtaaagtgcctttctttacatttcatgcttctaggatcccggaatattgaatgcatcaatcaactcatatgttagagttaaacttgtgcatcgcatcatatatataggaagcatctcaaagtattacaatcaactcatgatatggcctctgcccctcatgcagtagaattcataattcgctagctacccggttaccgttctcaataagaacatgaaaattaaattagttagagtaacgcaatatatatgttccttcaagggcccacttaagcctcttatttgcagcccaaataaggtactaggtcgttcgctccttggggccttgctctcatggtccggtctacacgctttttccgttggatgcacctagcccaatttcccaacagcctgggactcggttgggccagatggcccattccccgaacagaaaggaaaacctgaccccctatcgttgtgagatcctgtaacccaccaaatgatatccaccatatagtgaagggagcaaaagatctttaggcggttgatgatcagtttgcatatatcactaccgtcaagtatatatatagatcaactgaagtgagattgtttttatttaattagaaatctcaaattcgagtcttgagtcttgagtatgcaattgtattatacatgtgatctaaataaaaaaagaaagataaatttaagcacatcattttactagcatagttttgaccgttaaaattatgtataacaaggattttataattagttgaagtgtcacaaagaagttgtggcactcaagctgggttgagtggattgttaattttttcctaggttggaatatgactaatgtctagtggtactaggaaattggaccacgactttggtcgcataggggcacctatgctacaactcagcaccattgttgttcaagtgctcggtaatgggatgttatgtatgccataggggaggtattgaacgtgacctcttaccatcatgcccgagaaaagcgtagaaacgaggggcagtcccaagcttgaggactcttagtaggccatgctcaaacttaggttgaacgcaactaccctaaaaagaaaaacacatctagctagtagtgtcacttattattattattattattgttgtatagagagtacgggggagatccccttgggaacggaggctcaaaataaaatatatcgcgtaacaaagggatgggaatgaaagtgtcaatcattgcttttcctttcgggtgtttaaaagttatactaaattaagaaataactaaacaaaacgtagcgactcaaatggaggatcgaggcttttcttagtcatgctttcctcatctaaatcctattaaaccatgaagaaaaatcaatctaaacattggattcggtcataaacggtgttgctacgcatgctatttttcggactgtgatgggttttgtttcctcattacaacacttgactcaattgcattacgtttaaagtattgcattaatttatactaccaaatgaagctttttagtggttttctcaaacacataaaatattgcttcgaatttaacgctggatcccagattagaaaattcatctcctcctctttccatgaggatgccagtttattcatgcaaattaaggtaatgatggtccataattggacaactcatttgtgaatataaagtggggttactaactaactatgaggattaaagactaaggattagcatgcactctttggcatccaaagttgagacctccctggacaagacacataggattgaattcgtttgtcatgttccatcacatccaaaggaaacaaaagaaaaattactgtggctttattattttcagccttcgtgaacgtatatcatttgttcagatagagatggccttagttgacattggggactcatgttttgtgagtggagttattgttgttgtgagataagaagcaagatatcagcacaagtacatgcttataggataactaagaagaagaaaaacatgcatatggctgggccaaggagtaggactgggatatgagaggatcagagcagtgcactaatcttttagtttcacccttcatcatagtttggccggcccaaagtgtgcctaaatccattaaaacaactgggggagtgccacgctttcatgattccttttggaatgcttgctaccccacctccttacaaagtgtggtgcttgtgggggagaaagagtgacaatgagcaaccttttatttcccccttttcttttcttgcaggaccattttccattggagagaacatatattccgttgattaactaagcaattaaccttttctctctttcaaagaaagaatttaaacctctacctactaccacatttaggtaatgtaacaacctgtgtttttaacttaagagtaaagatcgggcttctcttttgtttataaaatattttgtttacatgcccatgttttcaagttttgtgcagtttactttctggttttaagaaattgtgcacgcaatttatagctggtgtaatctttcagaggaaggccaatggaaataataagtattattaattcatagtaatatataaataacgagtatgatgaatgtgctaactatgacatcaaaaatgggctctcaacctaatgttctgatccagaaagtcactgctatgatgaatagggtaggtaacaatcttcttatattctggggtcatgttatggatcatggccaaaaggtacaccaacatttcataaagactaaagaggaatgccaaccagattgtaataatgctcgcatttttgtcctcttttgagtttcaacaatgtcaaacaaatgggtactcatagactcgtatatagcaattagtttgtactgtctaaagagattagtaattgaatttgtattcaaattaatatcccattcttctttttaagctaaaaataatatttaaacacggaaatatatataaaattggataaaggaccatctacaagaataggacttttgtttgtcttttttgggaaggtgcagtgcaaggattgagttattttgattcttggtcatggggatcaagcattgcttaatttctacaagatgagaatgcatgtgcttccatagtttgatgtggcttgccatcttcagagttgacagcatgaatctgcacatttgtgaaccagaaagtgatgtaaacctcacaaaggagagttcatgaatataatcatatattttaggaaagcaccccgggctcaccttacatgtgaaagtcataaaggaaaagggataacgcataactttagcctttccataataaccgtaactttgaagctttcgtaccagataaactataatccaaattccagttttgtatctaaaatttaacaattaatttacctttcagaatgattagcaatgttccaaagtcccatgcgaattatattccgtatttcgactagaatttcatggttttgattttgacctgcaagtcacaactagagagatgaaaaagagtgcaacttccaaactttgagggcgtacaagaaaagggaaagaagaataaatataatttttaaattaagagaatgatatagtataatatcataacatcaacaaaacattaagattatgttaatttattattttatattttatttcaaaaagttcttaaatagaagaatatttatatttattaaaattaaaaaatatctcccttctgttttctttttcaaaactttaattttaaaatataccttaaattaagcaattacttttagttcggcaccatttaatttttttttaaactctacattttttaaatatagttttataaatatattataaagtaaatcaccattttagtccataaaaatataaaatattatcacattagttcttcaaactaagaaaaatctacataaatttgtaaaagatgataaaaatactatattttaagctcattagtccaaaattaaagataatgtgtgacttaagtaacagtacttatatatatttataaagatcaaaacaataataagtaattgaatttaatgactttaataaaacaattaaaaagtcatggtttcagaaactaatataacaatatattaggaatcaaaataattatttactctattttttgtcacaagtttaaatatattttttatatattcatgatataaattttttatattatcaattaattattttaaatataacatgtaatgtaaggtaatttataattattattattataatttttttatcatatctaacaacttgtaattaaataataatataaaataacttttataatgtgaggatattattatgaattttatatagatcacattaaaaagagaaaacctatcacactcaataataaaaaagtttgtcaagaagtggaatatttttattattcttaataattaacttcttgcttttgactgaacttacgtacttagttataaaattaaaaattcatttaagatcatggttagtttaaaaaaatatttatattttcatgaatagttatgaaagattttaattaaaatgtattaataatgtaaattctttaaattattattaattcaaccactaattatcaatcataaataaaattaatcaaatgtaataagatataagtagttaatctttggaataagatgtttaacgaaaataatatttaaactttatttcatcgaactttagattagtcaattagttcgtttcattttttctctattaaacgagggttaagataaaaaaaaatcatatataaaattaattacttttttatgcctaaaagaaatcttattttcttttaaagatgtggatgagtctgattagtgaattgcgaaaacagtaagtggcattttctgtatccaccaccaaaccggcattcattaggcacgcacgcgctttggatccccaatctcattgctctggttccgaaccaccattttgaatattttgaacgttacggccatgctctatgccaattcacaattataccctctctttctcctaatgtctttcttttattcgcggcaaatatatttctgtctatttttttattttaaaaaaagacattagcaaattttattttttagagtattttaaaattaaattaaaatttatttacagtataatttatttaaataaataatttgtgattaacaatgtaacgagtttctatactataatttctaattgatagcattataattttttataccaataatatatacaaattacatttttatattattatatagttgtctatggtatatataaattaataattattttaaaaattacttataattaaataacatgttaaaaaaattaatttaaatatactaattgtttaaaggtcttatatattcttatttaataatcaattatcatgatacaattgttaaattttgtattaaacatcgtgaaaatcatatttaaagtgatttttaattagttgaaaataattttttttataataacaataattcaaaattaaactattctaaaaccctttatatttacaatatgtcaaaattaaaatcattaaaaataatattttaaaatattatttataaaaatatgtaaagtattttaataaattcttgcatttaattagttccaacaaaatatatcatgaaacatttaaactttagttaggaggagtttagatgatttatatgatattaaaatctttcaagtacatttatatattgttaggctaaattatcaataaattcgtatattttcaataaatttaatgttttatctgtatatatctttttaattaattccttataattttcgtatttttttaatcaattttttcgtattttgtgagtaagttcatacagactaaaatcatttaaacgtattaattaagtatcattaatgtgatatatgacaagcatttgacaattaaccaattataattatatatccatgttcttaatcatcttacatatacgaatttggatttgactgatccttcttttttgttgatcatctggatttgactcctttatattcagtaaagataaaccaagtaatgtcaattattaataaataaaaactgttgatgttctagcatatatatgtgcatataatatgatcattaattatttacgttaccctgttaaagtttataccttgaccatgatattcttttacttcattcctttaatttgaattaaccaatactattcctttaattataaattataattatatatctatgttcttaatcatcttacatatacgttataatttatatacgccacacatgcatgttggtgcaatgaaaaataaggaatagtattgctttttggaaaagacttttttatgagacaaaattcttggaaggcattaaaatcacctcatggcaatgactcctgtataagagaaggaacaaaccagtgatctagtgatcttcttctctgcttggtgcatcaatccttactttatttgaatttacatagttagacatttctatgaattactttttgggatatatcatgtaacactactttgtatagtgaacaaacacttttgaatgtatatttgcatttgtatctcttgtatagtcgtgttgtctattaatatatgaaattacactttgccttaaaaaaaacacgttacaatttattgcccttctctgtaccatttaatttgtaatagtgcaataaacataaactcataatcacatggtaaaaaaacttcaatcacaagatgaaaccatgacaaaaattctagctgtcnnnnnnnnnnnnnnnnnnnnnnnnnnnnnnnnnnnnnnnnnnnnnnnnnnnnnnnnnnnnnnnnnnnnnnnnnnnnnnnnnnnnnnnnnnnnnnnnnnnnttaactcataacgtgaacgtacattttatctcaacaatatattgctggcttgagaagattattatgtgtttacacaacaaaaaaggttttatgttatcttttttctttcgtatgatcatatcactcatgcaaatgtacaaaatgaaaaaaaataatattgcatcgattgggaaatgaatacctttaagaagaaaaagaatggtatgctaacaattcgtccaacaaaaatgagactgggtaaacttgtagattttagagaaagaaagcgaaaaatggaaaatataataggaatattgatggaggaaaattgagaaatgcatggctcaaatttaggattagactgaaatgaaaaattaaaaaaaaaatgatttacacattaatttttatgtaagaaatgattgatgaagtgatgatcgtataatactagtaataaagtcacattatgggatattcatgctttttatgggatgatttcacattgtgccattaacaataatcaaaggaatttaaacagtgttagctttctgacacttaataataaaattttaaattataaggactaggttaaaagctttcgaactatagatatttaactaaacaataaataaaattgtagagactcaatggattaatttaatatatttatttaatataaaaaatgtctaacttttgcattgtttagttttaaagtttacagaaaaatatcgatgcacttctaaatcgacagaaaaactttaatatcgaggcctaaaaaaggtttttctgatgtgacattaattggtcagcataagaaaattaattagcatgcttgaaatatttttttaaaataatgatttaactgaaatatactgaaaatgtaaaaattactctatcattaaaaagttaacttttaaattatcactatacaattcacatttaacgtattatttacttaattaatctataattattaataataaaaattattccattttatgtacatatctattgatccttaaattactttttaaattttaatttttttaacttattaattttttactacttttatattttttttattaattgtatttaatttttattttttattatttaaaaaatttagagagacacggagtacctctcttgtccctagtaaaatataattttttataatttcaatatatcaaagattaaaattttaaaacaaatcctaggtagagacggaaccatgtttacaggggcgattccccccttcaattcataaaaatttctttacaatattataataatgctatccatctattgaccccctattgttcgagtattttttttactccaaaagaagataggagattgctgcatattaatctgccaagtgtgttaattcattgccctccgtcgttaatgtttacataaacaacaattcagaattcaaattcttttttcatacttagaatttaaattcaattatttccaaagtaattaagtatatattgttcctacattaaatatattcgttaacactaacctccattagacaattgttttcttcaaatattttatattctgaaatcaacataaatataaaataataaattttatatataaagtgtatgtaggaagtaagttatatatgacaccaatattctcaaatagttcatcattttgttccttcctatcccttaatttgttaagtcgtcatcttctttgaaatattgtaatatttttcatcctcaaaaccaataggagtagtaagaacaaccaatagcatgtttaaaattgcatttaatttgatagataaattaatttgtataaaaaattaattttaactatagttcgttattgattcatgtgttaaactcttgtcccactaaaagaaatttctagtttcgtcccccgatcctagcaattatacaaaaccattgaattctatttcacttagaataacttcgataaaggttatgtttggaataatttttctagaaataaaatcaacttacatatttcaatttaaagaagttatcttatttaatttcttttaaaacatgtcctaacttatatataatttagttttaacttataaaaaaagtttaattcattaattttttttcctcggagtgattaaaaaatttatcaaaagatgatcgaagccaccttggatgagaatcacgagaaagctacagttaataagttattattgcactagtatgttactcctaatttttttatttttttatattggttaataattaaatattaaaacatattactaacacattcttattatgactttgagtacaatttaaataaaaaaattatttactaatttcttaataagtatcttaataatattgattaataatactatttttttttcattgacaaaatttgccgccatgtaccgttactattgttgctgcaaaggcaactgtatttcaacaaccacttcactaaccgacagagacgttctgtctactaaaacgacgtggtggcatgccccattccatttacagttactacttagatgaaaattctattattttattgtaaaagatgatgtgaaattctcagtggtcgctttcaacctttctaactggctaaagctaacattgtgtggcaatttcggtgaagctgaaggctatccacaatccactttcgtgacttggaaacttgatcacatcccatctataatgtataaaaatgttgaattctgtatgatcttgtgcattctggcttaataacttattgagtaaaaagccagatgcttaacatcagacaatgaagtgacactcactgaacgcgttgtcacaaaattccaattcatcaacataagttggcttagttaaattattcgcaaggttaatttgcctaaacaatgataataagccgttttgtcactccagtctcggtcataaagccaattagtagcatcttaaagatagtcatcatcatgttgttagaattataaactatgattaatttcaaattccaacagtatgatagggacctactaaatttttgccttttgaaaatcgaagagcaaaatattacttttcaaccaaggttgattgactacacgtggtgttttgtggatgagcattaacgaagtagacaaacccaaccacctccaacttctcaaagagaattttttaagtgtttggatatatatatatatattgaatccaaaaggagagattttattctaagttgggcaggacatagtacttcagagcggccagcagattataaagaatattaaggagggtcgactcaatggtcgtggcattaagtgacaactatacacttaaatttgtttaataagaagaaatattaagaaaaagaggttatggcaacaaccaatataacctacgagtattaggaacagggtctatctaagcgcattagttttgtgtgccacactcataaacttgttttataaatactactatgcccttaaactagaaactcggaaaaaaatgaagataatataagacaaataatttatcaaccagtttatataaaatttacaacacttgaagacatgataaaaagattgttgtataggcaatgataatctaaaatctaaaagataaatctttatctgtttaatcacacacacttaaattctaaagtttttaatgagacaaatcttaaataacaactaatgatgtatgtgacgggaaaaagaacctaatttttctctatttattaattatagatatctcctatcatagatatagtgattaggttcacactatttttcacaccgattagaattaggtgtctgaagtgtattatgattaatcacattatttgatggacttaagtatcatcaaatagattataatattaatccattttgataaaataaaatattaaaattaattacatgataattactaggaaaattctaaaagataattcaaggggaataaaaaactggcaagccattcatttttttttccggaaaattaaagtttcattaatagcacaagaagggctgaaaaaacaagttacagagacagtagctgcaacagtacataatgttgcatctccctatgaagacaaaaactagctgcgtaagtggcttataaatacattagttccatatatgacatgctgactgggccaattaatttcgtattgtattttggaaaagaaaaacaaaagtgaatcaaacaaaatcattgtgatttataacaataaaagtttgtgttaaataactattattcagtttccttctgagagatccactgcatggtgtttctttcgctagtttttccacgttacaaataataaatgaatgattctttttataatcatattatttgttgaaatattcattaaatttgttgataattatatatagtaggatgtttgttatattatgagatagtaaaataattattgtaagatatatcatgcattttctaaagtagttgggaataacattttcatgtcatattattgaaaaaaaaattggaattaactcatgaaataagcatctttaatattcaaattcaaaaccttatatagagagattaaacttaatttaattcagaccaacaacttatttatataaatgaataattctaaatcttttttataacattttccaattaattctcgtatttgttttaattacatggtaagtattgaatatttttatgttttcaaaacactaaatataaaaggagaataaaaccttttgttaattaaaatataaaaattttatttatttattttgatatttattttattttatttaggacatttatatcattttacaaagatatgtattatattttattcttttttactatacaataaaaaaaactatttcacttgctaattttcatgtttcatttttctttcttttctacatcaaacatatcctcaaatattttttctttttttatctaaatcacgtgtattttttttttataagaaacaatgatgtatgagtttgagttaggtaaaaatagtacaatccaattcatttttaggagtaaagattgtttaacggaaaggttttataagaaaatccaataaaaaagaggttaaaatatgattactagttaaatattttaaatttgagtcttaaataagtaattatattaaatatgatataaaaaataaaaaaaatagtattaaaaaaaaactaagtatcacaaaaattcccatttcctaggttgaagtgcacgcgccttgaaacgaagtgaaagaaaacatcctggttggagttaggaaacaaaacaaaacattaatatctatttattcatgtttaaaacataggatcggggaggtttgtaagatagacaggttcggaggtgaggcatgggaaggtgtgaagcaacagagtggtggagagtataaagtggataaacaaagagagagtgagagtgagagagagagagannnnnnnnnnnnnnnnnnnnnnnnnnnnnnnnnnnnnnnnnnnnnnnnnnnnnnnnnnnnnnnnnnnnnnnnnnnnnnnnnnnnnnnnnnnnnnnnnnnngagagagagagagagagagagagagagagagagagagagagagagagagagagagagagagagagagagagagagagagagagagagagagagagagagagagagagagggggagagagagagagagggagagagagagggagagagagagagagagagggagagagagggagagagagagagagagagggagagagagagagagggagagagagagagagagagggagagagagagagagagggagagagagagagagagagagagagagagagagggagagagagagagagagagagagagagagagagagagagagagagagggagaagtaatttacgttgttttagtaccactttgtatatctgtacagagaaagagaaaaaagcaaaaggtaacgaagagaatccctgtgtgtgtgtttgaattgacaacaaagaaacctcagcaacactcaacaccatcatcatcaagtgttaaaatcagagagacagaaagagagtgagatagagagagaagagactcaacttttgttctatctcttctttttcttctctgttgttcctcatcaatattctttctttttctcctctttttgggtgctgtggaatccagctctctggtgaggaaaatgttgatgagttgaattgttgaacattgtctctggtgggagatagagaggtcagcttaaggttcggttggtgtgtggtgttgttttgttatggcggcattgtcgttctcagtggcatccgtggtggaagatgtgcttcaacaacacggtactcgcctcaaagatcttgacttggaatctagaaaagcagaagaagctggtaatttcccattattttttctgggattttgtcaaaattcagtttttgaatcccgggtgctatgatgtttaattataatcctttttctctctgatatttttgcttttactgaattttaatggcttgatgcatgtcactttcttatgaaaaagcaatctggattttgtattactgttatcctgagattgaaagtcttcaaaatgcagcattcagaagatatgaagcagcagggtggctgaggaaaatggttggagttgttgcagctaaagatttgccagcagagccatctgaggaagagtttaggcttggtttgagaagtgggatcattctctgtaatgttcttaataaagttcaacctggtgctgtacccagggtgagcatggtcttaatttgatgtactctcagttttaatgttgttgtctataagctaatgttgttgtctataaactctgtattgttcttaaaggttgtggagagtcctattgattctgcactagtccccgatggagcacccttatccgcatttcagtattttgaaaatgtgaggaactttctgctggctgtgcaggaaattggagttcctacctttgaggcatctgatctggaacaagtatgaattgaaatgttaatgacacaacacaacaccatataatcccttggcacttagcaacattgtgtactttggaagtttaataatattttgtgttggttttctgctaaattattggtttgtgttttagggaggaaaatcagccaggattgtgaacagcgtcttagctcttaagtcctatagtgaatggaaacagactgggggtaatggtgtgtggaaaattggaggaactatcaaacccactgtctcttcaaaatcttttgtgagaaaaaactctgagccatttactaattccctgtcaaggaactcgtccatcaatgaaaaatccatgactgctcttacctctgatgtcgagtctaataaaatggttggtaagctttatctttggcatttttctgttctctggatttgtcaagttgaacagaaagataactaatgcatttttttctcttgcagtctgggtctcactctttgagtatgcttgttcgtgcagtactattagataagaagcctgaagaagttccattggtgaggggctatattgttctgtgtttcacaaaataattttatttatttagacaaatggagtataagtctgttatgttgtaagccttgagcatctactacattataatgcatttaataattgtatgggtatttataatcattgttaagggcttcttcccttttgctttctggatcataaatgttataaaaataaagcttcctaaatgcagaattgacagtaaaaataactactgcactagtcttgcaccgctgcatttcaatcttgtcatttgcaatgctagagggcttttgagattacttgctttaagttacatggttcttctgcttggaacagttagttgaatcagtcttgaataaggtcgtagaggagtttgagcatcgcattgccagccagggtgaacaggtacaatacttttctccttagtaatgtataatgtcgtaagtttttaggtgatggtgggtaagttgttgtgctttatatcactccattcataggaaagaaaaacttgttcttgctatagttgattgttttgacaagctgtgttcttggttatttatttatcatgtaacttacagacaaaaatttcaagaggtgctgtgttgctaggcaatggatctgtatcaaagtttgttatggcagataaaaaggtaatagtactggcctcaagcttaacatattccatgaccttcatgaaacttgaaaattctaatacttatctagtttttgattcactagatggataacaagattcctatggtaacaaagaaagaaagattgctccataaaaactttgtcgatgatgaggaatcgaaaagacaacttctgaagaagcaaatgctctttgatcaacagcaaagagatattcaagtagggaacaactaagataatattaatctttttaaatgtgcaaattttttatttattagtaattagtaaaatattaccttgtgtttttataggaactaaagcatacaattcacaccaccaaagctggtatgcagttcctgcaaatgaagtttcatgaggagttctccaatctaggtaatattttgcttatgattaatttattttaagttcttagctatattgtttcattccattctaatttgcattatcattggtggatgaggtgctgcatctcatttgattttccattcttctttataggcaggcatgttcatggcttagctcatgctgcttctggatataatagagttcttgaagaaaatcgcaaactatacaatcaagttcaggatcttaagggtaaattgctgattggctgcctgctataagcttattatgagttatatctcattcacacctttgtaaagattttgttccaaaataaaattaagatggctaattttgtttgatcaggaagtataagggtgtattgtcgagtaagacccttcttatctgcacaagcaaattattcaagcacagtgaataatatagaagatggaactatcacaattaatattccttcaaagaacgggaaaggtcacagatcctttaacttcaacaaagtctttggaccatcagcatcccaaggttggtttggttttcagtttcagctatctccaagatcaccataatttagcaaatataaaaaattttcttctcttgtgttcagcggaggtcttctctgatatgcagccactcattaggtctgttcttgatggtttcaatgtttgcatatttgcttatggccaaacaggatcaggaaaaactcacactatggtaagttacacttaattgtcacctaaaaaaccttaaaattttaatggcactcttctaatcaatgtttcttacatgcagactggaccaaaagagatcaccgagaaaagcagaggtgtaaattacagggctctaagtgatttgtttcttacagcagatcaaagaagagacactttttgctatgacgtgtctgttcaaatgattgagatttataatgagcaagtcagagatctattggttactgatggatcaaacaaaagatatccttttagctgttaccttaaaattatagaatacatatataattgacttctactttgattattttctaatattagtcagttaaactaaagatgaaaacaacttttactgataatgcttgcccttaaccatttatacattagaaattcgtagtaattctcagagagggctcagcgtaccagatgcatgcctagtcccagtttcatcaacaaaagatgttattgaactaatgaacctgggccaaaggaatcgtgcagtcggagcaacggcacttaatgatcgtagtagtcgatcacacaggtatatcctattcattgtcctgtgatccactcttgtttatatacattttttttaatgaaacaattatccattggcttcttaaattatcaattttgcagttgcttgactgttcatgttcaaggaagagacttgacatctggaactattctacgtggatgcatgcatttggttgacttggcaggaagtgagagagttgacaaatctgaggccacaggagataggctgaaagaagcacagcacattaacaaatctctttcagctttgggtgatgtcattgcttcccttgctcagaaaaaccaacatgtcccttacagaaatagcaaactcacacagttactccaggattcactcggtaaggtttaagaagctagtttgctttagggtagttgtgcatgtattccagacagatgtattcttttctattcgtcagttacacaattcgctccaagttgaatatatctcattatgttggttgcgtttatttcaggaggacaggccaagacactaatgtttgttcacataagtccagaggttgatgctgttggagaaacaattagcaccttaaaatttgcagaaagagttgccacagttgaacttggtgctgctcgagtgaacaaggatggggcagatgtcaaagagctcaaagaacaggttgatattcaaatttgactgctggggctctccgtaataatcttagaaagttaagttaaattttttaattgtgtttcagatagcctgcctcaaggcagcattggcaagaaaggaaggtgaatcagaacattctttatcaggcagctctgaaaaatataggacaatggctagtgagctatcaccttatcatgcaaaccaacagggtgctgatattgtgagcccagggtgccggcaaccaatgcttgatgtaggcaatatagaggtatgtatatttcattttcgggttgttttctgtttttgataaaaaaaaaaaaaattcctcaagtttacaaagtgctttgatgtataggaaaatagtaatccccttaatttttagaaattttacaacgcgagtcctgatatgactttggaacaaaatcatgtatgttaataatacaaatatatacaatgagatcctcaaatgagagttttaagtaacaagtacacagcttcttatatggtttaggagcaaattcatgtttattaatagaaatagccctagcagttgcataaatgtgaacaaccagtttacctattgcttgttgaactctggtggatttttaatttttaaccatgatcttgcagcttcacagtagtaccacattgagacaaaaaactcagagctatgattttgatgagatgtcaacgaattcaccgccctggcccccggtgaataatcctagacaactctatggggatgatgacagagaaactggctcaggagagtgggtagataaagtcatggtaaacaagcaagatgctaataaaactgagaacatcttagggtgttgggaagcagacagtgggaacttatccgatgtcttttatcaaaaatatctccaaggttcttccaaaatgttctcagaacgatcctacaacatgttcatgggaggcaacaaccagtttaacgttgctggttcagatgacatggatgatcttgatgatacaaccactgattcctcggaacctgacttgctttggcaatttaatcattccaaacttaccagcatagccaatggcaacggatcaaaggctaggagacctgtctcaaagcccacaaatagcccagtattgaggtaatgcaaaaagggtcttctttcagaatgcttctttttctgtgcatgcatgtttggttttgtttgcattcaaaagcaacaaaggtgcgtgtttgaattccacattagattacccagaataatgttaaaatgccagctaatgtaattttagataaatgttcacattgattttgcgttgaaaaattaattcttaatttagaattaatttgacttcaagcaacataaagtaacttttgcattggattatgttttttaaaatgaattttattactaacttgcttttagaatacaaatatctaaatataaatcacatcaatttcattcaaaatcaattttgataagactcactcaaacatgctaggtttacttcgaagagtcatttttttctataatatttttagagtattttttttaggggggaaacaagtatttttcaaaaattaagatgaaagaaaagaaacatgcatgctcacaacttcatacagttttgtttctttcttcttctttttttttctctttgatattaatctttttgcaatttttgcagcaagaataatgttcattcttctcttggtccttcaccttcaaggaaacaatcaaacagtgtctcacatcgaacagcaagacatccagctccagttgacatgaaacgtaaaactgggagtagaaagtaaacttgttttgaaacgttaaaagggtgatttctatttttattttttatttctttccccctttttctttttttcaattttttagatggagggcttttgcaataatatttctttttattttttattttttattttttgggtttatgcttgtaagttttgtaacttgtatttacgcagataatggagcaataatgcccgttgcttgtaccatgggtccatgacattcttttcattttacactgtagcttttaggtgatgtaaaaatttcaaaaccactgaaacgatcaaaattgcaacaatggtttgatttgtaaagtctattttcctatgtcttgatctattggttgcccgttgccccttttctcgtagaagcaaaagctgtagtgtcttttgaattttcccttatttctttccttttcttgtttgatgtatggtggagtgtctgagtgtcaagcaataatgtaaatgaaacatgaatttaattaatatacattaactatttaaaaaataatgtcgtcattcaataatgcaatcatattatttcaattagtttaatcaatcttttttgaaaatttatttaattaaaatgattaatttcaagccaatcaaaatgcctttagactaacttatttcaataaaataataaattagataataaaaataataataaattaaattaaataattaattatatgtgtaacatctgcataatgttaaggtaggggtcctaggggataaatgttagaatttagagtatggatcctaacgtgctgccaatttttttttaaattcaaattacttttcagcaaatttatccaaaagaaaatttaattataattataatcaactatacatataattaattattaaaataatctaattttcttgtgtaatttaatttttccagttgtgattttcttttgcattatatacactactagtaacattatttttatcctagtgatacaccagaaattttactaatattatttaattttatgaggtagtgttaaaatattaaacttattttatataatttgtgaatatatttatgttttatttaagataaaattattataaacgactgaatttttatttaattataaattatgttttgtaaatatttttttgaatattttttaacatttcttctaagtagataaaaaggttacgaaatactacaacgcactttttctttgaaaagattttaaaatgaaaaatctatgtaaatattcttgtcaaaatccatttatagtgttgtatagatcaaacataggtactaatgatttgcatggaaaaggtcaaaacctttatggacatagtctaataacataactttaataatttaaaacaaagtctaattacatatatataatattttttaagctttaaatactctagagttactgaggtttcatatacttagactatatatgtagatgcttaattaatatagctttcaacttccaactaaattaattattcgcggaaaaatgttttttattattgcaaagtttggaatcattctataaaatgttttttttaataaaaggtagaataatatcaaatatgttcatttataacaacaggagataaaaaaaaaataccaatatattaagaaccaccttgccaatcaatataataagcacaactttaaaggtgtttgaataatgacttatccttattcagtcatctgtcatgtatatcctttgtaacaaataacaagattctggtgcaatttttcgtctttataggatacagtttattgatatatgaatatggcgtatcacaattatcttatctttaatgtaataataataataataataataaattcttgtcaaattgctctgattaaacttgtacaatccaaataaactatgagcatataaatagttatcaataataatagaactagattgaaaattataaaatgaatgatgcgaatgtaagtatgtatccctcactctaacacctttattatatattactgtgagttataatataagaagatgcatataatatatgaaacaaaataagaataactttgattatgaagacaaaaaattataatcatgatatttgtatgaaaatagttatgttctttgtatacaaatacaccataagtatataactagttatgaaaaaaaaagctatattaatgttcattgtatctaataaaaaataaatactaaaatattggtgtatcacaatttttttttatatgaacatgatattggtacaaaataatcctcaccaaaagtaatgattaatttttattggaactgtgagtgtacatagaatgaatattttttttttaacataatttttattggaactgtgagtgtatatagaatgaatattttctttttaacataatttatttcataccacttagttaagggatacaggttgctaccatttgtgtaaattcttattggtcttgaatcacaatgcttaatttgtcatcacaacataatcaaattaggaaaataaattaggatagacaattacgtaaaaataggtataaaaaaattgcacaaatacataataataagtaaatggtaattttccttcaaattgaaggacaaatgaaaaggacaacaataaaatagcacaaaaacaggaaaacattttaatgttctcatagtctccaaatacaatttctcaaaggcaggtgtttttgagaaacctatgatgacaaagtatcaaatagaaaaaaaaaactgtagaattttagtatgcaatagattatcttaggttcacccccaaatatcaatgacacttgaataagatgtaaaaacaaaaagaaagagtgcttcttgttggtaaaaaaaattatatagaataaatggcttagtaagggactattgactaacatttgaaccagagagagaaatattagcaaaatactattttttgttggtgagattcatatagattgaacacaattaatagagaaaataaatattttcgaaatagggattaagacccgcgtaaaaaaaacacatattttcgaaacacaattaatagagaaaatacaaaaaatgttattgaacaaaatctaaaagaaaaaggtcaaaatgagatattaatggcaataagaagaggagaacggaaaagataagtggatagtgactatggaaataaaagaaatgaaaaagaaattagggtttacagtgcttgaacacagaaagctctaacataataaataaatcattgatgaaatgtaaggatgtgagatttttttggaacccatttaagaacctatagagaacggttggattggagaaattgggtgcttacgaggtacttaagttgaaaagagtaaagatgattgattaatgtatacaaattagatccatttaagcacccaaaggtatgtgttgggttgcagatgctcttacgtatccacctacaatataatttttctgcctaattagaaggaatcacaaggtttcgataagaataatgaaacaaattggtactgtaaaatttgttagtatagttcttacggataaaaaaaaattggtacaaattagaaaactgattttaattggtcagaagaacgatggtaatagtctgatagattttttttatgtgggaactactatttattattattgagactaatggaaggatcataaataacatgatggaaaataaaataaaatgacaaaaaaaaatctcaatttagtcaaggaaaaattactcttacattaccttgattttattcatcaggattactttaataaccaattctgcgagactttatcttttcaattttttccctcttccattagaggtgtctttggtttcttttagcaaaaatctttgagaaattggatgcccgaccacgtcctgcccgatccaaaaaggtgggaacaaaaaatgtcaagaggttgggttgcagacaaagtggaaggcaatttttattttatcacttttaatttattttatctttctcccttgtgcattatttttttatagaaaaaaaaagattggatcaaaccatctttaaaagattctcagaatagaccaactttgcttagattctccttaaagggttggccacccgtcatagttgcatcactatgatatagattaagaatgtcaaatcaaagcatgagattccttacaagttaaaagttgtttgtatgatccaggtaccatcacactaattgatgtaacgtgtcacccgtagatttgatgataatgatcaccatgttttgcatgtcagatgcgagtttagtgctacttccataagaaagttgccatgagttgttataggttcccaagatgggtgaaagtggtacaatgaactaccattgatgaaattagtggtgacaaggaaatagccgtgccactctcaccatgtagctctgtctagcaattacaaaatgcttgagatgaatcaaaagcactaacccgacattgggacaagaatctttaaaccttagagcatgcagcactcccatgattcctaccttaattagttaaggattggtagcacttgtcatttatgacaacaaaacgattcaaaccctataagcccaaaggctttccctatcttgtattagggcaccatccccttcctctaaattttatcaatccaaaaaaaaatgcaatgttaagaaacaaaaaacaaagatactctagattaatccagtggtctaacataaagataactatgcaaagaaaaccgtagttttgtcaagaccagcacaccacacaccctcacaatgcccagccatggacaacaaatcaatgtagcactccatattatacatggtaagtggaaaataatatcttgggctgtacaccaacatcaaaattttctagtacatgaatgaacaaattgaggctgtacataaaatatactattcagagacggacttttcatgcacagacaagaggaaggttcattgaaatgttgaagagaaagaacatctttacatcaagaatttccttttattggaaaattgtaatgaagttcctgatggaatatgaattttgtgtctcatgtacaggttgaatcaaaggaatgactagatccttagagatggctatctcatgcgcttgagacaaaactagatgacggatgtagggaagaaaagcaagaggaaaagtttgaatacgtgttctgcagatcaggacatggctcaggaaacacctccttggagattcccattacgttagaacaaaaccatgaaggagatgactcggaactggtagaaaaagtcacgtttgaaagacagataggagtgaaaggcgaatcaactattcctgaaaaattcccagcaatagcaatatttgcaccaatcacattctcaaaagtaacattaccaacatccggaactgcattaggatcatacttgtcatctggatgggagccagaacttcccgtcatgctgatacccaagtaaatattttccaattttgcgtcagaaatgaaaatgtttttcatgtagccacctctacccctagttgtcttcagttcaatgccaaaagttgagttggtaatatggagctgctctgcaattatatcagatatgcctccagacatctcacttccaaacgctaggccagcaccagatgacgattgtagataaacacccctgatgtggacgtttgaggttggtttgccataggcaactccatattcatcccaaccactcttcagcacaattgcatcatgaccagtgctaatattgcagttgtcaatgcaaacatgctcagaagaatctgcaagtagcaaatactaatgagattcataatgcctacaaaaaatagttcacagaacaggctccaagaaaagcaagatacatgaaaccatcactgcctgactaaaccacatgttgaatacaaatagaggaacatttttcagaattgcataaacaaaataaaaaaacctgtgaaagggaatacaccaaatatgagaactgggaacaataccctttcttcaatcatattgagaactcttactgctaactaaataaaagatttagacaactaaaaagttcatgattcaaatgtgtgagggttatgtactgcatcactgctctgaaaagtcacaagtaataatttctcaatttacctggaactataccgcttgtgtaagggaacttggttggtgcctgaactgttatcttctggatttgaatgttactgcatacattgtgtaaagaagatacttataaaacagaacagttccatttaagaagtcagtgacacaaacatgaaccacttgtacctgcaatatacgggatggatgctccaagcaggagagtttaaaaatgtcaaatttgagattatgatattatcagaaccaacaagttctataatatgtggtcggctataatttaaggaatgagtactgattaggtcccaccaaacagaaccctgcccatcaataattccattatcacctgttgcatttattaaatacatcaatttgagtatggtagcacagcaatgttcatcctatcagagaaatcctaaaaacaaatattgtaatggaagaaaatccctgcctgtaatcaccacatcacttaagttctgtccataaatcaaactgcggtatctcccaacaggaacatcaatacctcgaccataggagggtaggggatccattgcagtccagtgtgcataatcctgaaattatataaaacaaaaggcacatgtaaaatattccagagcaagcaaaattggcattccagtaaatatttttcattgacattttccttccgcagattgcagaaaattcacttcatgtacattttttatgctccagcagtgtgacaggcaggattaccagaaaagattagaagattggcattaaatagtttatcccgcttctccttctgcggggttttcacagttattaaacacactctactggtaagaatatgaataaggtgaacctaattattttgcagtgcaagtacaacattgatttgatttaaaaatataaattgctaccaaatactgactacatgaatttcccaccctgattgaatttcctgtgagaaaatttcagttgagtgtaagaaacaaatctatttggtaaccttcagtttttgtctatgaaatggacaaggtaattggaattgaggctaaaattcaagttaatgattgaaacctgtgatgcgatgatggttgcgcctctttcaagaaagagagtgaggtggctggtaaggttaaaacttccagtgagccacttgccagatggaacatatagtttagccccacctttgtcagcaaatgacttggcataaaaaactgcattttggaatgcaactgtgttcagtgtttttccatctccaactgccccaaactctaagattgacacgctgtgaggcctaggatccaacactttttctttacacggttcatgatcatcttctccattgccttccagagcagtgcttaatattatgagtaaaagcacagttacctagaaaggaaaaaagaaaaggagaaaatttaaagcacaccgacattgctaattgggtaagaactgcagagagggcaatgtggagatcaaaacataagatataatgaaattaaagtcatcaaaacttcaaaaaaataaaataacagcttgaagaacaaaataaatattccatttcagcttcctcttgaagagatgttggctttcgcccagagaaccaagtactgctagatagtattgattacagaagcaaacggacaaaagatgcaatttgatattaaaggcgcgaacacttcatattttcaaaaggtaataaacaaggggtatttgtgaaacaccctaacaattaacaacctatacttaaagcaaactaattaaatttggatataattcttaaaaacgttccaagaaaattgaaaagtgaatacataggtataaatacgataattagaaactgaacatgtaattgaaactagcagagcattaatagaaaatttccagctagaaccataaacattgaccgaaaagatctctagacccattttttcagagacatgaaaacaatgccacaacgaacctgccacggcgtaatcaatcaccaacctatatattcactaaattcgtttcggcaaaaatccttttcaataggagaattgatcttgacaacaaggggttgacgtaattcacgattaaaacccagacattataataaaatttaaccttgaaagtcactacaaaatctaggacaaacaccgagatcaattgtgggtgttgaggtaaaaatcaaaataaaaattaaaaaaaaaaactttttgttttacgggttgcaacataattcaaaacaaaataaccccacggcgaaaaaaaaacatttttttttctcttagtaatttgttgaaaacgtacttacgagcctcttcatgggtctgtgcccctcttcttcaaagagaaataggaagctctgaaagcagtgatggaacaagagtgaagaagagggtagaagaactagaagaagaacataaggacagcacaagaggaagagagcaagagctatttcgtatataatgccaagcaagtactggaaacaataaaaacaaacggggggaggtagtagaaagcgacggctataaaggaaaatgccagctccgcacttcattttccttattatgtaaatttccacgcatacaaaaaacaaggacactggattataaaaatgttatttaattaattaattaattaatatcaaacaataattccgggtgtttaatttcccattagtcctttgattatcaagaaaatattaatttatgattccctcttgccgacaaaaaaaataaaattggctctatccaccaaaggctaccaaatggacattattcatggtcaatgtgcttatgagtaatgaattttaaggaaaaaaaaatatatagtgtgcccattgattttgttaaatatgtaaactaattagttacgtattgcacttaagtgaaatgtgactatgtgaacaagtgacaggtttgatcagttcttctccttccctcaatcattgctcttatatgatattttagaaatgttacttttaatccttaaccacatccttcccattaacccatttagcatatttggtttgtatataaaaaatatattatatttattgtattcattgattacacttttgatcttctaagtgtatattatatttattatatataaaatatatgataaatttattaattaaatatgttgtttttattatacaaatttataaattttatatatttttttattaaattatataaaattttcaaaataataaaaaatagtggaaaaaatgtacaattaaaaataaatatattatacaattataattaagatatattttattatataagtcaatatagataatatcaatataaacataatattatgttatacaaaatattaaaatagtatttattaacttaagaagttgtattattaatacataattatttaaaatatatttttttaaaaaaaatataagacattcaataaaaagacgataaaaaatataacctaaatctgtatccaaaatacaacaatctatttttttaaaaatctgaactaattaaaagtaacttcgaagcgcaagccaaattactaaaatggaatgaatcataaacactatcattttttttacaaaagtcataaacacgatcctaaatctaaatataatgtttatgacttgtaaaaaaataccaaaatgtcattgtggagtacaaaaattgtcaaacaatctaggaggtatattttagttaattaaatatgatgtgtgacttgttataaattttttgatagaaatgttcataaactgatttaaaataaaagttgaaaattgatctaactgattttttttatttgtttgaattttttttctcaaatcaatccgttaagtttagtttggagtttttgtttttgaaacgcaataaaatcataacatattattttattaaaatatgctttatgtgtatatcattttagttaataatgtttcatagtgttatgtatatgaaggtttacaatgtatattattatttttagatgaatttttttaagatatgtttagtttaaaataaatgaaaattttgtaaattttttattattattaataatttttaaatgtattttaatttaaaaggtgaaaaaaaagtaaataaattttaataaaataatattttagtaagaaccatattaaatcaaaccgtaaaatattggtttaaattttattttaactaaaaatcaaatcaaaccgcatatattttataaattagattcggtgactttgtgataaataactaaatcaaatcgagtattcttacttaattcttactgatacacaaattatgaaatacaagtgtcataaaaactataccaataatatataatacattacaacatttagaagaaatactaagcaaatcgagtaaaatactcgtgttccaattgtgtttttttatatatatgtaacgtgttgcaattgttggatttaaaatccatcaaatccaaaagctaaaaaaattatacaattcctcagagttacatccatttgaaatcgttgatgtcattaaattagagaaagttcaggagaacttcattttatccatctaatattcaaacctagaagctaatgtcaaggaaaacgtgcaagttcaatgagcttccaaatcacgcaattgttgactaaaaggcatatataattggcaaaaacatagctaaatatgaaagttgatttgtagttttcaattcatcattggcctataaacagtagcacctcaaaaaatatgaaaaatagtacaagcctatatggttaaattataattagtcaaaataaacatgaagtttttttctatactagaggaaaaaataaacatgaagttttggtatgatagatgcgtacagacaaacaagatttaagctctttatggggcaacgatttatagaaataatatttgaaattgaattgttcctagtatagctatgtttggtttaaagtcatagaagtattttacgaatttcaatgtaaaattatgtgttctaatatataaaatgagaagaaaaaatttattgttttggaataaaactacttttgaattctcaatattttgatccaaccatacactataacaatgttaaacattcatttattcatagttactaaaattaaatttagattcataaaacaacttagtagtgtttatttgcgtaaaaaaaatgtgagatgtcattcaatttggaagaaatgaaggagattctatctcatgttttcatcttttgtttttactttataattataaatttggcaccttatttttaatttgttttatgtttttaaaaatttgtacatgaaacaaaaaaacaaaaaaaaattacttttaatgtttcttgcacaattttttaaaaacaacaaatatattaaaaacaacgtgacatttttttatcaggacaacgtgaaaagtttataataaaaaaagaaaacaaaaaataaaaaacacaaggacatgttttgctatgatttttagttgtaagtgttaaaatttttaaaaacaacaataaagttttagtttcaagaattttttaaaaatcaaaatttaaaatttagttagttttaagttttactctaatttttagttttagaataaactaattttaaaagttgagtcgtattaaaattattttaacaatgttcttttatgatatattggtagtgacaataatgatgatgacaatgtcaatgataataatgataatgatagtgatagtgatgataatgatattaacaattttgtcaccgacaataataaaaaattcacaactactatgagatatgtccttaagcaatccttcccaagatttgctacctttaccttttcaaaaattattctcaacttacatttacattataaaatagtaaattttaatttattataattttttgttcctagttaggagagtacgagtgttccccaacctattaagttaaaggttaatctcactcgaagtaagtgatcaagagaattttatacatgataaaaatcaaacacaacttattctattaaataaattttttctatttatataaacacaacatattcttatatcattttatcaattctttagattattctaatttattataatcaataaacttaaatttattcatatttaaaatataacttccaatcacgaattaatcttttttagcatccactccttcacatcaatgctttaaaaattaattttactaaatataaaataagcttctcattacttagtcaaacatggtattaaaagcaaaattacgaaattaccatttcttggatgattttttttatctaccttgtaataacttaaaaaaatatttattgcccgcataacgaataattttatttttttgacattgcgttaacttttttaaatatatatttacggtaagaaataaaactcgaaaaaaacacctattaaatattaatagcactgagaagttggaaaagaaaaactctagattgaaaatagcattattgctagtatttaaatgaatttttattttgtatgtggggattattagatactaatttttaattattacgtatttattacattgcttaaattttataatctgttcactgcattattttacaattattacaagagaatgtaaaactgggacccacaacaataatgtgtcgaaaatgctaggctggccttacttggcttgccagatcagaacatgggggatttcattgacgtgtcccaccaaacccattcttattgagtccatctaattttttaatacttttttttaaaggtctaattttttaatactcaacctttacatcaaattgaaacccatcttatgattttctttttattaaaatgaaacctatcctttttctggactccatacaaaatttaaaattgtaacaactaacttgtaagataagtagttgcaaggtaaaatataaataaatcacttaaatatatttgaagaaggttattaagttaattaatgtaagattactctattaattaattatcaaaattataaattaaaatacaaaatatgaatttgtaaatttgaacaatattaaaaatcaatttaattcatattttggtaaagtgggaagagaacaaaacaggagaaattacaagacatgggctaattcatatgaagtgacttaaactaatgataacttataaatatttattataatcaacattaattatataatgaaatttgaatcttattttaaaaaatgaagatgtaataatatcttttgactaaagtaattatctaaaaaagtattgattatttaacttgagttcagtacatatatatattttataaaataaaagatgtgactgggacaaaaattatatattatgacagtaacccattttaagaatacgaattcaaacttatatattacgtgaaggtaaatgttatgtcctaggccatatcaggtccccttgtgaaattataccctttccctactcattcatgaaaaatactaaaaacaaaacaatttgttctgttttccttcttctaagtgttgcctggccatagttgtacagttgacccatcatgagattttaggttgatttagtgaaagttaaaaaaaaagtaaagaaaaaaagaaggaaaaagagatcccttattcaaatcttccaactcatatttttaataaaattaacaaatttaacatttatggatgatcgatcatagaaaaaaatgattttatggtaaagtttttaaaaaaaatatccactttactagattttgaactgagctgatgcaaaattctgacgatcagaccttgatttaaatttagtagaatgaatagtgatttgtgatcccagaagccaaaacaaagagacaaaaatggagagaagagaaataagcaaagttcgcatgataaatggctgctgatagtgataagtggttgggtgatgataaattggcagaacaacaaagttgaatgaatagcacacgtaagtgtatatgagagtgctaggtgcagtgtatagctggctgcggtgagaaactccacaccagtgacaccacatgacatgtgcaccgttttaaatttggcactacacttcatttaaattaaacgtattttctattttggctatgaatttgataatgtggttttttttgtcatatactcttttaaaggtgtcgtcgttattgccagagtcttatttggttatactttgcagcaatgtcagggccccatccttctggagagataaagaatccaaggattttgcatttaaccaactcattgcatacctattcatgtgcgtgatgatgctgccactttaaccaatatttcaggcctaaataaaccagaatttcatatgttataatataatataaattatacagaatgcatggttggttgcatatcccagattggaaaggcataaccttcctgaattagatcgagtgactgtattttctcccatatatctagcagtataatccaatcttttttttttttttttgggtttaataatagcagataacattggacttaacttttctttgctgaatatcagctcagttgtatcaaattaaaattggatataacaagtgtttgatataaagatgaatatctgtttgttggcatgggcgttcaagaaaaatgcgttctatattttcttcttccattcattatatttagaatgtgtgcaaaaaaaaaacttcaatcttctattgaaagtgtgaattaactgacatagaattatctcatttaactaatgatcttgaatttaaattttgtataagcaattacataaaatatccattggaagagttttgtttctcataaaagacattaaccatctaattttcatagcaaacatatattatcttcatcacaatcattcctatatataaaagtcctttttaactaattcacaaatttttttacaaaaacaaactaattcacttaaattaaaaaaagttagttgatttaaatagtcaattaagtttattgacaacatgaagtatttataacaatccactatactgatataaacggtctatatcgagatagaaaaatagaaaaaacttacaatctcgagaaagtgaaccaatttatttcatcattccaatataattttattttaattttgaataaacatgttttattaatttattaaccaataccgacacttattgatgggattgcatatattttgattgtattgttttttaaaatgtaatgttctattgaagagtgacattcaactaacaatgaaaggtggagtgtggaatcactgtggagcagcaatggccccacgtactaggccactatcaaaccatcaataatgtctttgcaaatgctcgtgtaaggcataaaagtgaagttttggtggcaaaaaacgtaaagagaaggctcattttcatgcaaacggcaagaagcgatgacttataagagttgaattaaatccatttcgtgctatttgctttggagaagaatgtgcaacaagggcatgcagacagtttaaaagtaaagcatgtgagtgatgatgaggcacgccttacatagtcaaaattgtcttaacgaactccatagaatagaatagaatccaatacaagccaagacaattcataagacaacgcgtttgcatgattccatgcgaattaccaatgagacaaccaccaagccaagacaaaaaattgaataaagggaattggaagcatgcttcaaagttgtaacagcagaagaacggtgagtgattgatgtgtttagcgattcaaacgatatttatttaatttcattcctgaaagacgggttacaaggtttggttttttataaattaaactaaactaaatttaaatatgcatattgaattttaaaatcaaatcacctgttttttttatttttaaaatagtttaatttttgatcaagaagtgcttaattacataaccattaaatctgcaacgaaactcatgtttttgtgagatgaatatgtttcttaccaagtgaaccagcatttattagattttaaaagtttaagataataccaaatatagtttttaattattttaaacattagttattattattttaattaaccaaaaaaattgtaatgaaataataataaaggatctttggtaaaaataaataaataaataaataaaggaactaatttaacaaataagaagaagactaaattgaacaaaaataaatgaattaaatgatcaaataataattaaatcacaactaaggatttattgataaatttaatgtacattacatattaattatatttttaatttgtgcgcaaaaaatttaaacgacaaaattgatacgttgttatactatttagtgaaattaataacacgtgaatgattaaaactcgttatgataatatataaatattcaataaataacaatacaaaatttttacgcttacaatgattaaaattaatttcaaaaaaatgaagtggtgggtataacgtataagagtcctagcaaaaactaaaaagtggaagctagtaatgaaatggatcttaaagagaaccaatacttcccgcagttcaatattgggttattgcttcatgcaattcccaggttgcttcctgcactttttttataattttttttgacattttgggattattattccagaaaccaaaaaggaagtttgttctagaatataattttacattttggattgatcatttgagaaagcaaaaaggagtgcaccaagcaatagcctcaatcttgtcttgtttaactatttttttttttcaaatgatgtttgcatatgatgtttttcgagattttctttaagaaaaggggttgttaagccactcacgaattgtgtaacccacatgtccaaagcagatgttaaattattgggatttgatatttacacttcctaattaataagtatactttctccttcggctctcttgtggaactcagatattttcataagcttccattctttgggctgactattggcagaaaatttgttcaagcaggtagaatagttatggcgacaaaactattcttttaaatatttaacaccattacatattatatactctgttcaagcttaaaactgcacaaattaagtttaaataactccagacacaaataagaaatggaaaagaaagaaacatttttgtgttaaatggaacacatcttgataaaagcgttgcttgtgaggtgttcgtgtatgtctcatagacatgccaattattgattagaaactagagactggtatttgaaagaaacgattgcttaattatagtattaattttagaatctatatattttgtgaaaaaactattcatttactcatctatctatcattatattaattaactaattaatataatataaaaataattttaattaatacattttttcacatttttttaaaggaatacaatttatcaaaatttgtataaaatttatttattttatcagcatgacattggtctagagaatccaccatatattttaaaagtttaatgctttatactttttattgtctatatcaattataatgtgacatatataataaaaattaaaaaaagaataaaattttaatttttatgcattgattgatagtatgtaaataaatttatcagatataattaatgatatgataatgtaaaaatctaaataaactatttaccaaaaaaaatcaataaaaggtatttattatacataaaaaaaaactatgcagtatttaattttgaagtactaaaattacaaaatcatgaataaaacggatggaattaaaaacaagttaatttgagctagatccttattttattgtctggttgcaaaagctggtgtaagattagtagagtattcgtgaagaccaaatccgaacatttggctgcggtatctatctggaaccatctctttctcttttttccgagttgccactcagcgctgagagctgagtcacttggtttttcactttggtatacacaattcatttcctgtttcctcttcctccctaatttctgtaagttcccattttgattctcctaggttcaatctaatgttgcattttacactgcatcctaacctcactaaaaacgtttatgagaaatactagttacactctttctatcatgaaaattattatttttttggtaagttttagttttatttaatgattctctcataatttatattaaataaaaaacaaaatctaaaaaaaaaatgatgtttctcaataaattgtacctgagagtcttcgagagagtacagagaggttgcccatatcattcctcatcaatcgtttcattactattgggcctttacacaaaaaacgagggaattgcgttgcacacacccagtgacttttctgtttttccaaaatcacccctggtaaatttacataatccatatgggctcatacaattttttttttaatttttaaaaaatatgttttatgaattaatttaaaattaatgatccatgcaggattcaaacttgtgactttcaagttattaacatgacattctaaccaactgaattaatatatcaattatgttataaaataattaatgtcgctatatataacactaaaatttctaatgtatatttaatgtatatgtaaatttatataataaattttgtgataattaattttgtactaatatatttaatgcaccaaaattgtcacaaaatttattatgtgaatttatatgtacattaaataaatattagaaattaatgcaacaaaatttattatataaatttaaatatacattagaaattttaatgttatatataatgacattaattattttataacataattgatctgttaactcaattgattagaacattatattaataacctaaaagtcacaaatttgaatcatgaatggaactttaattttaaattaattatttgttaatccacatgggctcataagagattgccaatctgtaatggatccatacagattacggatccataatggattcatatggattatggatccataaatttgcccagggtaattttggaaaaacagaaaaagcgctggtgcaccagcaatttgatggtgtgcaaagaaattccccaaaaacgttaccaaatccaactagcaacggaaacaaaaaaaagttgtggcccattttattattgcttttcatggacacgaacaaaaaatgaaaactggtatgggtttttgctgaacaaaaatactagactattcatttggggtccaacttggaagaagactgcggaatcgcgtatcctgattggtcagacaagtgttatgctccggtgactccttccttcgccacccccactcaaattcaaccatggcgttgtacgtgctctcgcgtcgtttatcagctggatccaactcaaccacgctcctcgccttgcgttttgtttcctctaccagatcctactcctcttccttcagggaagaaagagatacctttggagccattcaagttccctccgagaagttcgttcgtcttccttaattaatttcgctttctgccatttcctctttttttttttttcacttcttatctgattgtgttgtgtttctgaactactgttatagattatggggagcacaaactcaaagatcgttgcagaacttcgatatcggtgggccccgcgaacgcatgcccgaacccatcattcgcgcctttggcgtcttgaagaaatgcgctgctaaggtcaacattcattttttcacttcttctacttccactgcaacattttctatgtttaggtattttggtcgtagatttcgattttgattattattccatcctctttcaattgatcaatggttgttttgatgcaggtgaacatggagtatggtcttgatcccgccgttggaaaagcgattatgcaagcggcacaagaagtggccgagggaaaactaaacgaccattttcctctcgttgtatggcaaactggcagtggcactcaaagtaacatgaatgctaacgaggttaattagttactgcttcctactattatttttgagctgcacctaaccttaatgttctgcatataaatatgttatagctaacatttaaggatcttagattagtgtacttgtgataatacatatttatcttcattttatattatagatagttcataattgtatttaagacttgagaatccattttcttttttctgatcttttcaggttattgcaaaccgagcagcagagattctttggcataagcggggtgggaagttagtgcacccaaatgaccatgtcaatagatcacagtcttcaaatgatacattcccaactgtaagcctcttgtaattatatatattcccgtttttttttgttgttgatatgtctcgccatctgtgtagtgcaactcttgatagactttcttaaactttgtttatccactgtacagctcttgtttaaagtattgatttctttttaatctatatttgtttacttctttccaggtaatgcacattgcagccgcaatggaaataaactcaagactaattcccagcctgaaaaccttacatggtacactaaactcaaaggtttgaattctagttcatacttttagactaattataatttataatatgttggatatattacagtccccctcttgccattttgtgagttgtgtcattctggttacagaggattccaagtgatttacattagacttgatatgtttttatcatgctacattgaaatctgtgatataaatgtaagaattctggtgaattgatatattcttcagtctttatatgattatcttatggctctgggcttctggccattttaccagtactaatacagggcttccttggttgtattatagctagatacaattttctagttctattctaagtttgttgtttactctggctctttatctcaattttctttttgggctacccagtatgcaattcggattggaaatatctaatgatgttattatgacagtggacatgttaggaaccttttaactttgataaaatatggagcctctaaaatggaattttataaactgaaagcatttgactttgtatttagttttctttaattggtttttatcattgtttttgtttttatcagttttaatttattttttgcctcttctttttaaaatataccagtcaattgaattcaaagatattgtcaagattggacgcactcatactcaagatgcaacacctttgactcttggacaagagtttagtgggtatactacacaagtaagcttgcttatgtttggcttgtgctgttttgtatttttgctataatggatgctgcattgtaaaatcctgacagttcgtggggtgtgatttctcattacttttttcctttatctgcaggtgaagtatggtattgatagagtaattggcactttgccgcacatgtatcaggttagattcaaatgcaaaagctaactgcttgttcttcactatttacttttagagttctgactaaagcagagattttgcttgaacagcttgcccagggtgggacagctgtagggactggattgaatacaaagaaggggtatgtatgctttttgatagctaagtgggggttcttatattttatttttattttgtaacatgtcagtgttttttttttttttttttaaatatgctatttgatgttttccaaaatggatttgatagcagttttccttttcattctgcttggcttattattacatatgatatgagattttcatcacagcatggccttttttcttaccatcattcaataccaaaaaggaatgaacattgcctggactgatgtgcattcacattttccaccattgagtttaataaattatggatgtaattgttgaaaattagatcttagatattttctataccctctagagaccttatggatatgggtttgttttatcatggaaataattactacaagcttgtaattttatgctgaagaaaatatgttgtttaacttttaaagaaataaatttggataaacaatgataatttcctggataaaattcaggtttgatgccaaaatagcagcagcagtagctgaggaaaccaatctgccttttgttacggcagaaaataagtttgaggccttggtttgttactataacccccccccccccccccccctctctttatatttaatgcgtcatgttatttcattacatcagcttttttcattgaaattgcttcacatgcagcaaaacattggcttgcagtgtgttaatattctccttttgcaggctgcccatgatgcttttgttgaaactagtggagcccttaacactattgcggcttctttgatgaagattgctaatgacatacggttgttaggaaggtaggttgctagttatatgacaccgattgacgaatttctttttcatgttcaatagaaaattatttatattcatgggttttcttaatactatcctattatagtggtccacgctgcggtcttggtgaactcattcttcctgaaaacgaaccagggagcagtatcatgcctgtaagatcctcatgctgactgaatataaatttgttacacaaaccagctgttttcttgtcacttgctatagttcattaatttatttgtcttgcaattggaatttgactctaagccacaactgtattctgtttcaggggaaggttaaccctacccagtgtgaggctttgacaatggtgtgtgcccaggtagacatcaattcacttcattttattaaaatactttaatgttatgacttatgaaatactgattggcaaacacagtttctatgacttgtaataaaatcacacatattgaattttatggtgactgggaatttctgaattggtgtcatgaatttcaggtcataggaaaccatgttgcagttacagtgggtggatcaaatggtcattttgagcttaatgtgttcaagccaatgattgccagttgtctcctgcatgtatgttttatgtataacttttgtggtgttacgttatttctaaattatcaattacataaaggggaacttctgactaggcattattttggttcatttttattttttttgtgaaattagaacagctaaaattttggctatagattactttggctcttagaaattagaataatactatcaaaacatttcttttctgtatacttacgcctggacttttgaactggttcaaagcccacatggtgcatagaaaccaagatgttcaagcagcacaagcttggtatatgggagctgttaatttctttattgttcctctgacagtttggcatcagaaaatttatgatacaagtctggtggacttggctggaaagttagacgctctttgctatgtcagtaaaataggaattgggatggaagatactttagataccatcatgttttatgattttttttttctacactgcttatgtacgtgtctgttgcgatgacatggtatatggtgatgccccagaaaaaaaagaaaagataaaaggctgcagtgtgtgctatataagcacaccacgttggcttttatgttattccaaaactttgcaatatgaaatcatatctcctactgcattacctgaaagatgtaccgaaatgcttaatcttcatttggattttgatagtcactgagactgcttggagattcatctgcttcctttgaaaagaattgcgtgagaggcattcaagctaacagggaaagaatttcaaaattactgcatgaggtgagttgttgacttattcgaaacaaatctcaaatgatgccaaatgttagatttacatccctacgctaatttgctgtgtttcacttttaattcaccttgcagtcactaatgcttgtcacatccttaaacccggtaagtgtcctcttgtcttctccggtaacttgctaattttcacatattttttaaacggaattgaatttgcctgtttcagaaaattggttatgacaaggcagcagcagttgccaagacagcccacaaagaggggtgtactcttaaggtgatgatgtcatgttatacttgtttttctgtttgtcttgcttattttgacctctttttgaatattaaaaaaaaatcatgtttgacatattaattcttaacaaattaagtttaagaaccatattctttatgcaagtatatccttgcagaagcatttcaactcttgtatcctttttcttccattaatagttgtgatgtttaaatgaatgaattgatcccttcttaatttgtgtttttcgtggatgtccaataaatcttggctaaatatggaaattgaaatatttgtttaggaagctgcattgaaactcggagtgctcagctctgaagattttgacaagcttgtggtacctgagaaaatgcttggaccatctgattgactggctcgtaatgttttgttctaattattccttgttttatcatcggctacattgaggtagtattttttagccacacccgttgataggtttgagaaatggcaatccaatgaacaataatttggcttcctcagttgatattcgcgagggaagagctcttccaaatttgtaatgagacaatgtattgcagaaatttactgacccaaataaagggaaaatttgtattcattgtccttgcattatatttccaattatttctggattataaaatgtcataatagagttattagtttttacatagtgttctgtcttgcttaggcgatgaatccgtgtcgatgataaagagaaggagtggtaaaataggtgtttaataattttactatagttaaataaatcttttttttatagcaaatatagttaaataaatcttaggttcgctgttgtttttgtttcaggttcatctaaggtgttttttaataatattttgtaaaaggatagatgattaatagaatgtattttttggtttttccctataaattttgcatggagcctattctaattggtataaatggcttaaatctactcattgactgaaactccccgttttctattccttttcttatttattttgtaataataacggggttgaatttggaccgtacacttaaccaaaatttgcatactcggtttttggattaatagaaggatcaacccctattttaagaattattcctgatcttgctataccctttattacagggctggttacgtgcgtcattatgggagcggttagctgtgattaaaagttatgccaacgttaattgtgattaaaagttatgccaacgttaatgtttgattggttaaaattataaaaacttttacatattgctgtctaataaactctttccctgatttatatttgatattataaagctattggtaatttttttattaattgtgtaaagagggctagagtccaaaactacccaagatctaatagcaattttgcacaacgttctgggaaatgaagacctatatccttctagtgatgtatgtatagtaacacatcccattctcttcttcataggaggtcgatggatttaacaggatatgcacaagaatcagattctatatagccctctaataagttgtcaacaactaattaagagtataatttatcctgaatctcagtaatcctatataggttcacaagttgtaaagcagatataatggctcaccccacaattgtgatctaaacactcgccccatatttcgaacaaaaccgaaaacttcaggtaaacatcactctaatgatattaataaacaattatttaaggatttgatttctatgaaaactcagttctttagtttttaaggagggagggattatgtacaagaacatatatatgacaatgcaagagttgagcaattcttaaatctttcgcttcctttttatttttgaaaattttttgtgtgtttgatttccatttttaaaaactgattttagttttcaaaaactaaaaaatagaaaaaaaattgaatggtgaaaataatttttttagtaagattaaattggaaatagcagctaccgtagcctccagcgtatgtttgtcacctcgtgccattttttttctggcttgctgccaatgccattttcccccgtctgtgtctattaatccgaaaacagaatttgacaaaggaagaaacacacaatcaactcaaaccaagcggatctaattcagttggttaagttggttaaataaaataggtgaattattgtaaatatcttataccatctaacttcaattactacaaataaaataaaaagaacttaactcaaacctagtagacattttaatttttaacccatacgctatcattgaaaagtggaaagtgaaaagggaaacatcttttagctggtttttaaaatattttttaaaacttaaaagaccttacatgagaaattgatttaaaaataaagacaaattgttttagaaaatagtttttaaaaaatgagaaggaaatccgaccctaaatatttatttctcgagaataatcaagttaaatctattttcaagtgcaaataagtttatgtgcacaaagttgttaaacacaacaacttcatagtttaggaaaagacaaaacttagaattggaattatgattagctatcttatacactcaacgttcatccggaaaacctagttaattaaatgtgtaattatgattagtttggatttataggtgtttaaaattaaataaatacaattgtatacaatgatcaatatgtgatttatactaatcacttttaaggtacagttaattgttgttaacattttaataactccacaatatttttatttatttgtgagacaaagttaattatagtttgaaatttcaacaccgtacccttataacattattaatcacatataaatgattgtatacaatcacgtttctttactattaaccagttgttagacaaagttaatcatgtatggacatgtaatcgaatcatattattcaggctcgatttaggtaaattttttcataaatacttataaaaaagaaaataagaagaaaaaataaaagaagtttttcaataaattaaaatttgtttatgcatgagttaaaaatatttatccttttctgaaatgttgattttaatttattcatgagctaatttttatttataattttttttatcatagtgatgttggtgtggatatttgtcaattttgtgaataattaaagtttgtcaaaaaaatctaattgatcatttttaatagagttttctattttaattatgttttttttatccatgaaatttaaacttaaaactttactaaaaaaaattgaagtctgtctcattccaatcaatgacttgttggtattttttttttataaaaacttatgaagaaatttatctagacacatactttattcttagttacttatgaaacaaaactaattattatatttatacatacaattaacatttgttcaatgaacaccaaatacgcacatgagatttgttaaaatacacatatttattttttagtataaatattttaataagttataactagatactaaaaaaacaaatatttattaacaagtatttaaacattattagcacatgtttgtaaaatttattaacatgcacatccttatttttttttagtatgaatgcattaataaattatagctaaaaattctcttaaaatacataaatggtatagttagtaaagacacttatattaataaaataaagagtgcattaaaaaatttatacatgacaatatatatgtgtacaattattgaaagagaatgtaaaatagggacccgcaacatgaaagtgtctaaaatgctaggctggcgttacttagcttgttagatctgaacatgggtcgtttaacaactttcattgacgtgtcgaaccaaaaagtgttccaaattgaaacccatgttagagtactcatggtagttgtcgcaactagatccaccttaaaacaaaaatatgttaaaaatagaagagtccccactcccgttaatatttattaaaaaaacattgaaaaaacttttttaaaaaatagtctttaaacattaaatttgggattagaagtgaattttgtatagagaaggtgttaacacattaccatgtttgtcctttaatttgttggatacaagggaaaagaaactttaagggaggggggagagacaactccaatgagatccaatccatatcttgttcgtcactggcgtatcttatttggaggaaccaaggggggcatgccccccaccaattattttataaaacaaatttttatatatatattaaaaattatttatatttttaataggtccttatcagatttttatagtatccgtaatttaaatttattaatttcttaattactaataattttataaaaaaaagtgagtgtttgggtgaggcctgagtggagtaaaccgcggtcgaactgggccgggttctggtggctggacacgtatagtaaatgttattttcctaggctgtatattaggttccctcttgtgtcaaagattgtaccctcctcttcctattgattcatgaaatactaaaaacaaataaacaatatgttatgttttccgatcgttcttttgcccatatatatagttgtacaacagatcgatgagggaaatgaaacacaaataaacttaatggtataattaaaaaagccattgttttattcacttcactagattttgaattgaactaaatgggaaactctaacgatcgatctatcagatcttgatttaagttttagaaggagtagtggtttgtgatcccagaggccgaaactgatgaaagagacagaatggagacaggagaaataagcaaagtccatatgataattgattgctgataagtggttgcaacgtagggatgataaattggcagaacaagaaaataaagtagatggaataagtctatttggtaatatacagtatgagagtgataagtgcagtgtaggggccccatcaataatgcttctgcaaatgcttatgtaaggcataaaagtgaagctttgggggaaaaataacgtgaatagaaggctcatcatttaaagcaaacggcaagtagctagcgatgagttgtaagagtacttgaaatcaatcgtgctattgggttttggatacgagtgtccattaagtgcatgcagattgcagacaagtaaagcatgtgagtgaatcaaaattgtcttgactaactctatataatagaatcctatacaagcaaaagacaattcatactttcataggaataggtatttgcttgattccgtgctaattattagttgagtacttttaacttttaacctttaactgagaacaatatttatttacgatttatgcttctacactaatttttttaggtgacatattttttttctaaccgtctcaacatgtcatcattaaggtttgtttcggttcgggtaatgtattcccattttaccatttttttcttgataaaaaaaagataaataactattttgatatttaaatatgtaaacaagtgataatttaattattgaaagaataatttttttatttaattccttgtgtaaatttagcatcaagatgtaattattatattttttacatattccgttcttgctgtatttttaattaaattattatcagtttaagaactaaaatattgtttatacataaaaaaaaagacaacgactaggccaagacaaaatatagaagaaaaaaaaaagagagaggcgacaggagtagaaatagcaaaacaatggtcagtgattgatgtgtgagcgattcaaaggtataattttcgtacataaaattcaggacaaagaaatgacgtctcaactgatttaatttattttttctacataaaattcaggacaaagaaatgacgactcaactgattaaaggcagaaaaaaattctccaaactcagtatgtatttaatttaaatgtaaatatattttggattttaaaatctaatcaacttttaaaaaatttaattttagatcaaaccatattcaaatcaaactaggaataaaattagattttcatcaaaactgtttttaaaaaattaaagttctttttaccatcaaattgatacagaatattcattatcaacaagaccttgttgatgaataatattagtcaaataatctaactaataatcacctttattatggagttttcttttcaatcaattttttttcatctacactctagagaaggaatacatccaatttagttttactttgaccaacatgttaatagttaaaacttatttaaagagaaaataaattatgcacaagcaatataaaataattttatattgttatttaatcacaattcatcatatataataaatttgttaatttatgataattattttaaaaattatattgattatgacgtgtaattaaccggtagtgtaaaactatattacacatgatcgttgaactctattttaaaatagtctaaaattaatttataataattttaaaattaaattttgtaaaaaaagaatttaaaatccatcttagtaaaaagaaaaactaaggattaattggtttgcattttggtttgcttttttttttttttttggttatagtataaccgtccgttaataattagagtttacttttagaagttttactatctctgatttttttaactatcgctttggattaagaaaagtcattttatttatatatcattttaaaaatttaagatgttgttaaatattatttttattatatttaaatcttaaaaacattattactttaattaaacaaaagcataattataaggataatagaaaaataaaataataatttattcaaaatttaataaaaatattaacatataatttattttataatctatgcacaatatttaaatgaaaaaatagcaatatatagtatgacatgttgatgtgttgtgatattatttaatgatttttttcttttctatatcgctttaatgatattttttctattaacatgtcataagtataaaatatttatatgataaaaatgtacttttttttgcatgttttgattaaagtttgcaaaatcagttaaagtcttatttttataaaactaagtttgcatacatgtttttttttaatgtgaaaacatatttttggaggtaatcaaacatgtcacaaaaataaatttactcttcaaactaagtttagaggcctaaagagaaaaccaaacattttctaaatatgtcactaaactaagtttactttcccaaatttgaaacatcccaaatcaaaaaccaattaaacatagccattatttgataatcccgttgttccattataatagttattctaagttattattttacacggataaaaaataataataaataaataaaagcgagtaatatttttatatcattattaattcatttataaatttgattgtctatcattaatattaacatatagaaataaaaaagttaattaatattataatgaaaagttaaaatgataataattattttaattttttctcttttacacaataattataatgattataatgagattgagaaaatacatccaatacgtaaatgacgtaatgattttatatgatacattaaaagaaagaaagagataaaagagaatatatgatgagtaatataacaatatgaataaaatatagaaataaataaaagatatcaaatagcaagtgtatgatatacgaagtgtgtatattattcttcaatttaaaatgctcttgttagctcaacaaattatacaaaccacttttcttttatgctaaaactttcaagactgcagcttcgcgtatttgcatgaaatattaaccacaaaaaccaataattattatgcaactgtagagcctagctgtctatctataatgtgcaggaaatccgaaattatccgatccctggtccgtcacgagctgcttcttcttcttcttcagtattattgatatgtattattgcatcctgtagggtaggagtgagactgaccacattgctcgctatgattaatgtgctttaatttctcggagagacatgatatttaaacactcataaattacaaatatttcatcaccatctcaaatttctttttatcacatattacatcaccaacaatcaaagcaatcacttttttaattttattttttctttcttttcaggtgtaaacacacaaaacaaataattttcctttcgataggggtggtaatatttagacttttatcatttacaaacatcttattaatattttattttatttttttatctatttctgtcctgtcatataatcaatcttattaatcatgtattttcatctgtttgtatttctcttatggtgtttatgggatctcgaaaaatcatttttcataaaagtgacaggtgaggttagaagagtggctaatcactgagagaactacacctgtaaagtgtgtaacctacgaatattatcgtatgattcatactaaatatatctatatagagagagagagagaaagatttcagctccaacttccaacgagactgcgtgtggtatccttatagattggctgcaatattaccctttttcatttttgaagtatcgtttgaaattgaagtacaatggcactttccttcagggaagaaagagatacctttggagccattcaagttccctccgagaagttcgttcgtcttccttaattaatttccctttctgccatttcctctttttttttttttcatttcttatctgattgtgttgtgtttctgaactactgttatagattatggggagcacaaactcaaagatcgttgcagaacttcgatatcggtgggccccgcgaacgcatgcccgaacccatcattcgcgcctttggcgtcttgaagaaatgcgctgctaaggtcaacattcattttttcacttcttctgcactgcatgcagccatgcaccatcccttcttagctacttgctgcacagttaccccaggactgtggtaactactaggcaaaatgacacagttgtcatagttttgacttttgaattttgatatatactgtgtcgtacatctggtcattagtagttgaataattctaaatcctcttacttcttctcttaattattaccttttaatgataagttttaaatatgttatgtacttttaagacattaaatgtttttatttttccattcaatattgcaggagaatgaaataaaaggatatgacatcatttcaatccaaaccaaatttatatatgtgcgtaatttttttttttataaacaaataacatctctcctatttttatttttatttgttatatatttgtaaaattattccataaattataataatttgtgaaaaatatatttagttaaagttaataatttagtaattattcgaataaagatatatatatatatatatatatatataattattaagtttggaatttttttaatagtatatatttaaatatttatactactgtgaaatatttttttttacaaatactattaatgatattatgacttataaatgaaatattttatattttatttatttttcattatacttattatacatcttattatttatttaatatttccttaaaaaaattaattcaatcaaaacccctttagattgaatatggtcagtttagattgtttattttaaaacaaactgattgaatggtgagttaagagattagagtgattggattgattaatttttcactttaaaatcaatccaatcggtccacatctaaggatgacaattaacatagtataatgtatacgttcctcatacttgtatttgaaaaatatacatgtactgactttatactagtgtggtgggtagcaattttaatttgcatctttgtacccactagatatatacatactcttattcgcacatgttatctgcatcttcttaagtgtagagttgtgacaaaaaactacaaggttttaagcaaaattatatttaataattaatttaataaatttatgaagttttataattaagtatttataacatttcactatcaatatataaaaagataaattcattcaatttattctttaacacatttaatttcaaataaaatttaaatgatttaaaaaaaaactacatttagcggtaatagtaattacaagtatgatcagtaatattttagaaataaaaagcatgtatctaaaaatatactttttaatataacttaatatttttagtagagaatgaactattttaaaaattcaatttaataaaatgtcaatgcaaaaggcttttatacggccatttaataaaagtttgattaatataatgttacgatatggtgaattcttattagtttgtaagaatattttacactaacaatacaaatgagttaaattcttttttctcttttatttcttgtaatatttttattttaaaaaattaagatatttaatattttaataatcactgtaacttatcttttatgtcagaaaaaaaactacaacttatcttttaaatatattacaatacctatttttgctggtcccgggcacggggtcccattgagcagtgttactgtgtgagtattttttttttcttaagatatccagagtctaggtaaagttatccttccttttcttaaaatatatttattattaatttaaaaaatcatatcacaaaatttattatggtagaatatattatttgttaatattttcattagtaagattaaatttatgtttgaaaaaattagctaaaaagttaattaaaaattgaaaagtgaactgaaagttacataattaattgatagttgaaaattaaaattttaaaaattaatttattaaattataacagttgaaataattaaaaaatataaaatgacataaaaataataaaattatttttatataaaaagtataataagaaaatttaataaaatgtgttgaggataaaaataaaagaaaatataaaaaattaaaaattaacgttttaaaaatattattttaaataacattttaaaaaattttaaaagttaattgaagtgttgaatataacttaagtaataataagatatgtgtgcaaatgtaattattaaaaatttaagtgtaattttattatttattggtgaaaaataattttgtatttttacgaacagtacttctctccctctaaaaaagtaatataatttatttctatactataaatctgaatcttaattatgaatgagagtgtttttaagagttgttcttcaacaaaaagtatttttaggatttttgttttattaaacgagagtatttttagatgttattactctcgttgaggcacctttcttattctaatatcatatattgtacataaaattttatttttatttcttatgcacttcttaattttaatttcaaacttaatttgatttaagaactagactaagaaatttctttctccgctatcacaaatcactatcattatatccttaactatatacttggtcttttgtaattgcttgctgcgttcaatataaatgtatcctttcattttaatttccaaattgaattttaattgtttttataaaattaacaatagttaataataacctcgtatctcaatataaattatttattataaatttaaaatataatttatattttaaaaaacatgtatttattatgaatttttattatgacataatttatatatattaaaaaaacataatttatatatttaaaaatacttatttatcaggcatttttttgtgaccatttgttatgcattctagttatataaaaaaaatatttactttttgcattacaatgttagaatactaatttgtattaaacttaaatttcataaataaatctataatatatatttagggttctaactcagttggttcaaccgtaataaaaaaaattattcataagaattgaatttaagtataaaaaattcacaataactcatatatattatttaattagttgaagtaaactccattgataatattgtatttgtattgattattttgtatatttattacattattttgagtgaaccatttttcagaatatgagatcatgataagattaatcttgataagattttaacttccagtgtctcttataatattaaaaatcttgatttatttgaaaaaagaaacattgcaataaaaagctggtgcaaatttctgctaaaattatatcaaaagattatatttttttcaattggtctcttaaattattattccatcctccttcaattgatcaattatagttttaatgcaggtgaacatggagtatggtcttgatcccaacgtcggagaagcaataatgcaagcagcacaagaagtagccgagggaaaactaaacgaccattttcctctcgttgtatggcaaactgggagtggcactcaaagtaacatgaatgctaacgaggttaattagttactgcttcctactattatttgtcagctgcacctaaccttaaccttaaggttctgtatacaaacatgttatagctcacatttaaggatctcagattagtgtacttatattaataaatatcccatcttcattgtgtattagatagataattcataatagtctttaagacttgagaatccattttcttttttctgatcttttcaggttattgcaaaccgagcagcagagattcttggccataagcgtggtgagaagtttgtgcacccaaatgaccatgtcaatagatcacagtcttctaatgatacattcccaactgtaagcctcttgtaatgatatgttcccaaatttattgttgaattggttcactgtcaatggtgtacaattcctgatgaattgttttcctactgtgttacctggtatacaatttttaatctatatttgtttacttctttccaggtaatgcacattgcagccgcaacggaaataaactcaagactgatccccagccttaaaacgttacacgatactctaaactcaaaggtttgaattgtagtacatacttttaattagactgatcatagtattttggatagattacagtgcccctcctgtgatattgtgagtcgtgttattttgagtgatttgcagtattataaatgtgcgatataaagaattctggtgaattgatcttcagtttttatctgcttatcttgtggttctgggcttcaaggttgtgtttttctctggctctttatctcaattttccttttgctctcaagtatgcactttgcatttgcatgttaggaaattaaccttgacaaaatatgtgcctcttagatgaaattttacaaaccggaggtatttggctttgtaactgattttcttaaaatggttttttatctttgcttttgttttattagtttttatttaaatttttgccttttcctctaaaaaaaatatcagtcagttgaatttaaagatattgtcaagattggacgcactcatactcaagatgcaacacctttgactcttggacaagagtttagtggatatactacacaagtaagccttcttatgtttggcttatgccttatgttgttctgtattttcagtatcattgatgttggatggtaatatcctgtgggtagtgatttctcattagtcactactttttcctctatctacaggtgaagtacggtattgatagagtaattgacactttgccacgcatgtatcaggttagacacttaagtacaaaccataactgcttgttctacactatttacttttggagttctactaagcagaggtgttacttgaacagcttgcccagggtggtacagctgtagggactggattgaataccaagaaggggtaagtattcttcttttttatatctaagtgatggttcttatattttctttttgtgacattactgtgtgttgtttatttctgtaagctatttgatgtctgctaaaatgaatttaatagcagatttcctttcattctgtttggcaaattattccatttgatatgagattttcatcaagcttggtttattttcttgctagttaccatcattcaataccaaaaagaatggacattacctggaatgacgagcttgcacatattccacagttgattttaatttattatggatgtaattgttgaaaattagacattctctaccctccagagatattatggatatgggtttgttttattatgaaataataaataccaaacctaccttttaaggctgaagaaaatatgtggtttaactaaagataaacagtgataattttctagatgaaattcaggtttgatgccaagatagcagcagcagtagctgaggaaacaaatctgccttttgtcacggcagaaaataagtttgaggccttggtttgtcactaaaactttattttcccttgcatttaatttttcatatgctatttcattacattacgttacatcagttctttcattaaactcgcttcatatgtagcaaaacattggcttgcagtgtcagtgtgctcatattctccttttgcaggctgcccatgatgcttttgttgaaactagtggagcccttaacactgttgtggcttcattgatgaagattgctaatgatatacggttattgggaaggtaggttgctagtaatatggcatcaactaactaattgctttttcttttttaatgttcaatagaaaattattcataatatttaatgagtttgcgtaatgctatcctattatagtggtccacgctgcggtcttggggagctcattcttcctgaaaacgaaccaggaagcagtattatgcctgtaagatcctcatgctgactgactatatttgttacacagtgggctgttttcttgttactttctatagttcattattttatttgggagttgtctagctcacccaagtaaaaatgggattaaaaaactccatattgaatgattggtagggagaagacttttgttaggagtagtactgattttggtggtctgtatgcctcaaaaagaattaggcttcatttcgattttagtttgtaaacaaaagtttgaatgaaattaattttgcaaactgaatttgtaaaagcaactctcctttttacttccatttcaaactaattaagtttcaagttgtaacaaaactcagtttaaaatcagactcaactcaaaaccaaacaagatgtcttttcaattttacttcttgaacatacttttgagccttcaaaatgacaattaaacatgcacttagtcttcaacttatagttgggagatatcctaatgcaaacaaaagaaaatgattagttcaattctctatgtatttcttaattgcaccaatcatttatatttttactagggataagttagacaacaccttctatgtgccttacaattggagtttgactctaagccacaaccttattctgtttcaggggaaggttaacccgacccagtgtgaggctttgacgatggtgtgtgcacaggtagacatcacttcattttattaaaatacttagttatgaccattgtagttagcaaacagtttccgtgacaggcaatttcttaattggtgtcatgattcacgaatttcaggtcatgggaaaccatgttgcaatcacagtgggtggatcaaatggtcattttgagctcaatgtgttcaagccaatgattgccaattgtctcctgcatgtatgttttatatatttcttatgttatttataatctatcaatcacataaagtggaagttctcactagtcgttaattaggttcaaatttttatgagatattttgacagctaaaagattagttagagagtactttggctcttataataatatcatcaaaagggaacttctacatactaatacttggacttttgaactggtccaagcacacatggagcataaaaacagagattgttcagaaaatttatgatacaagtcaggtgggcttggctagaaagttggatgctctttgctatgcctatgtcagtaaaataggaaatggggatggaagatactttagataccattatgttttatgatttttttcttttcctgcattgctcgtgtagtcatttgtctgtcgtgttgacatggtatatggtgatggcccagaaaaagaagaaaaaaggttggtgggttagtgtgtgtgcaatatcctgcatttcctaaaagatgtactggaatgcttaatctttatttggattttgatagtcgctgagactgcttggagattcgtctgcttcctttgaaaagaattgtttgagaggtattcaagctaatagggaaagaatttcaaaattactgcatgaggtgagttattgacttatttgaaacacatctcaaatgataccaaattaatgttagattcagatccctatgctaatttactttgtgttccacttttatctcaccttgcagtcacttatgcttgtcacatccttaaacccagtaagtttcctctattttactcctgaaacttccttgttttcacattcttttgaaactgaagttaatttgactgttccagaaaatcggttatgacaaggcagcaacagttgccaagacagctcacaaagaggggactactcttaaggtgatgatgccattgttattcttgttttcctgtttgtcttgcttattctgacctctcgttttgaatattaacaaaaaaattatgctgccatatattaattcttaacaaattaaatttaagaagtacactatatatacaagtttattcttgcagaaccatttcaactcttggattctttttttcattaatagttgtgatatttatatgagtgaattgatcacttaatagtttttgtgtttttgtccaataaatcttggctaaatatcgaaattgaaatgattgtttaggaagctgcattgaaactcggagtgctctgctctgaagattttgacaagcttgtggtacctgagaaaatgcttggaccatctgattgattggctcgaatgttttgttcttataattccttgtttcatcatcggctccattgaagtattaagtattatttatacgaaagcaaaaagcttatatacatatatcctagaacaatgcaccaaagaccttagggtcaaggtttataaaattgtggttatgattgcagatgcgattatcgcgattgtggttattgcagcagctacagcgggaaataatcttatgtttgtacctgatactaaaaacatgtaattctttatgtaccttttatttagaatgttatataaacttcttctttttttttaacagaatgttgtataaacttttataatattagtataattaaccttaactaagcctaactctatactaagaagtatgaagtaaatataaatacaatttaaacttacgtatcaaaggagtttctaccaaaattttggcagaaccgtcccaataatatggacatccaaagaaagtttaagcatatgtagaatcacaaaaataccaattgagccgatacaaactcttaaatgaaccagacaaattctaattaagcttctaaaaatctcgagtgcaatgcaacatcgccacaaagaattttacaattacgatttcaaaacgactattttagaagaatcatgaaaacgaaagtcattaaaacttcattcaaagctagaggaggagtcttcaagtagaagatttagtttcttttttcttctcccataatgtgatccacctattctactatcccttatcccctataatactaatagaatgaactgtgcttattaaaatctcgaattaactcgctaactcttacgaatttagtcctttgtgagttaattcttgagtaaattcttttttttagtaaactctagacaaactctataaactctgagtaaactcgatagactctcgagtttatcaccaagtcaacgagctagcaagttaaaaaaattagaccaaaatgtaaataattttttattgttttctctctgtataacattcaattatttagtgtgttattctcaaatacaaaatccctacctttaataatatcaagcttttgttctctaatgacattaaaacctcgatgagaatgatctaccactattataacttctgcaagttattatctagtagtgatatattattactagacttgattaattaaatattttgaactttatgattcactattttgctttattatattgttgaaatgtttaattagtatgttatttataaatattttgttattatttttatatgaagtagacttttatgagtctacgagttaagtctcgagtttatgcaactctcgcaagtctacgtaaactctttagtttgataaccttggaatgaaccatattttgcttgtaagtaatcatttaaatcaccaagttcctaccatgcttattataaggcatcttttgttcatcattatcaccctctacgacgtttacattatcacccctatcacttggacttaaatcaccatcattttcattaaaatctcatcaatattcacattttcataatcaatttccttctgttgtgaataatcaataaccaattaaagcaaatgcagtaccccaccccacaattgtgaccaaaacattaatcaatgaacagttatccgaggatttgctttctaagacacaactcagttccatttttaaagggggagggattgtatagagggacatattgcaagagtttttaaactctttcctgttacttaattttgtaacttgctgaagttgctcacgaaagcatgcaaagtgatccaaacatccctcgtagtcttcatcaatactgaaaaaagctcattataattgcatatggtataattgcatcgtggaattattacgagctacgcaagaatgcttattgagacaagaaacttcataattgataaaacaaataacaggccagtatttcgaagccagcaaacccatcttcataacaaaatagcataaacaaataaaaataatacaaattgcagatgtacaacttaaatttcgaatgaaactaacaaggtctaagaaaacgagacaatctgtcaaaaatacatatgccacgtaactcaggatgtcagccacattgaatattcaatgcccttccttccaatctccaaaaatgtcacttctttgatttctttgatgctctgcacaaagcagattcatttagaccacaacatggccaacaaataaaagaagctatttaagcaaaggcatgaaccacaatactcactgggctggctgggatgctgttgcagatggagcacttggggctgctgatggcttctctccagggccctacacatttaagagaaaatgggtcaaattcttccatacaactttatggacaattcatagtggtgatgtaaattgccaagcagaggggctaagaaaatacaaactcatcaatatatagatgaacagatagattctcaaaacattagaaaactcacttgagccaaacgctcttctctcctagcaattttcctttccctgcttgccttgttctttgcccgtttggcctcaaactggtcagataaggtcttctctcttgccttctcagcctttgacttgtgtatgctctccatcaagactctcttgttcttgaagacattaccctttaccttcatgtacatatcatggtacatatgcttgtcaatcttctttgcttccctgtacttgcgaagcaatcgtctgaggacacgcatcctcctcatccaaaggattttggtggggagcctagcctctcttgtacccttacgcttacctattaatttgtatttaggcaaaaactgttaatgctttttgtcagtgccaggatcatatagcaattcatgacatgatgcctagacagcaatattccatttttaactaaatggacaacttagtcccttaaatttgggattcattgtcactttagttcctagattaaaaaaaagtctctaaaactgtaaatcatttcatgtaaatccctaacactaactgccaaattggtccctgaacatatgttcatttaagtctcatgttctattgcataaaacttttggttgacggatcacagtttcgaggactgttggaatttagataattcttggactaaagtggaaacgaatcacaattacaggaactaaattggtcatttactctttgattttcatatccattattagtctctactagcctagaacagcttgttcagcctaaactattagcatgtcacatctattacattggtctttcccattgaaatgcaactcaatttaacctagtgaatcctacaaggtgtcaatgtttgatgaccacagactcatttgcaatttgcataaacacacttggtgttagaaaaagttacataccatatccagagtggcgtcccttcctcttggcctccttcattcgacgagcacgagagcgagagtgaatcttagttggcttcctgataataaacccatccttaaccaacttccttatgtttagtcctgcaaaaggaaacacaccaaactatcaagccaattcgccaacaatataaatcaaacagcatcatatattgtatgactagccttgaaccagaaatgttgggcgaaaaacacatcagaaaacttcaattgttaggtacactaagaaacttatatacatattccaataagtgaaaaatgtcgtagaattaagtgaattcagagaacaataattcagtgaaaagaagctaatgagaagtgcgtacgagaattggccatggagatttcattgacctcattagggtcaagccaaaccttgcctctaccacacttgagaacgcttgcggcaagccgcttctgaagtttcagagacaccatctccctctccctctctctctctctctccggtggaatgggagaacggaatgaggaggcacgatgtatatcactcgcctctgtcagaaaccctaggttttgcttctttttgcttttttcctgtgcttgcagcgcaaggtattttaatttgaccgtttactgggccttgttgacaatattgggtttgacattatgtcacgcggtccattttcgtaaatactactcctttagagcactcatatttttcaggtaaacttttgtagttacaaaaataagataaattttacatttgaaaccctaaatcaattttctttttcatttttatgttgataaataaaaaaaatattcttattaaaaaaatatcacataagtacttataatgggtttaattaggaacaaattcagaaaacattcaggacaaaaataaacaaaattttagatttataattatatggataaattgtaaaattatatttttttctacgaaagcttatgattaaaattttaaaagaaatgatggaggtagaacttatagcattatataaacaaccaaaggattatgtttgagttgagtttgtttaatggccataagattatttttcttgttgttttaactgtttctattatgataaacttactataaaatgatattttgttgttgttgttttaaccgtttctaatatgataaacttgttaccaatgtgtctgattttcaactgtccgtttacaacgaatatccaaacatgcattaagaatatgtttggtttagacaaaagaaatataaaaaaattaaattaaaataaaatataagaagtgtgagtttcacaaaataaaatataacttttttttgttatattatttctccactcatataataggtgggaaaaaacagggaacctctaatgtaccatacaatgacaggtgacaacaacttattattactgtagtataaaacgaagctcgatattttaattttcataaaacaaactgttaaatgcaaaggaagagagagaacatacgcggtgaaaaagttggcatgaaatgatgataggtgttcgatgtctggacaaaatttatataattatagattattgattaccttcatgtgttagagtccatgaaatggaaaaattaaagatgatatccttttgagcgtatttttggttgcacgttttgatcaattaaacaagagtcagactgaagcaccaattcttaaattctaagttgcacaggctttatgaacctataatatatgattttagcacgatagctcattagagttcaggatccacgtaagggtgattttaactatcactagtcaagatttattttatttaattttttcacacacttccataatatttcaccatttattattttaaataacttaactaataatttagtgcaatccaggcatctttaagaagcttcttaaataaacctcacaacttaaaacatcaacttattcagcaatatttaattttaaaaaataactgtccaagaattaaaagtaactatttgatccgtcaacaattgaaaagcaacaattgctcactctaccagtattatgatgtgcaaatatagaattctctccaattattgacaattactttcagaattggttttgcaagaacaattaccgatatttgtttccttctaaaagttgctttatggcttctcgcttaataatcggaacaaaatatggtttctttatgaatgaaaagttggttgctaatagaggctcaaaagtacttttggtgtcaaagcaacattcattcttcatttgcgttttggaattcaaaaatatgcattagaatttatataaaaaaaaaaaaaacatttctcactttaacctgaacttagcacatatttcttatgtgcataactattgttacaagttttattataatttagtaagtagcaatttgtcaagggtatgctttgttgagagggtccaaactaaaatcattggttatcctctcctttctcagctattaatttaaaactcgaaccttaagtgtcttcttgttacatatacacagctcttttcttaagtttttatcttatctgtagagatcgaagacaatatcaaagggtttacaagaactcacattttgttcaatgaactgagttaaatcccccttgacttcttttctgaaatttaagcttgaatgttagtttacaaacaatgatcatcaccaacgagaataatgagtgccctcattgccaatagtcaaggaaaaaacatcagccacagcctacgcctcatgaaagaaacaattggtaaccagaccatatagaacaattttttttaagaatcataagaactttacaagtccaaaccatttactccatgctatattcaaaccaatttggatgaattgtacaaaattggtacatgaggttgcactaagttgctagtattttttgtcagacctctgactatctcgacgaaaataacgacagaaattctgtagttgcaactaatccagctaatattcttgttgaattgtttcaagggtaagcaaaggcataaaatcaagtaatttgtatttagttgttgtcagcataaggtgagatcagtagaacgtaagcacacaagggatgacataagtatctcatcaaaatcatgaatcatcatagcaaaaaagtagaacaacgacaacaaacaaaggacaaataaatcttatttttccattgataataccatggaaaatttcatcagtaatgcatatcataaaaaaaatatccgataaattctatgttagctatataaatgacaaacataggcagagtaactaaaagactaaaaccaacagaaagagacgtgacaaaaattacttgagcacggtaactgaagatgcccacatagataaagagccgccatccaccaaatctctgatcacacactcacttcttggatttcttcagtgctctgcataaaaaaggcttcacttagatcacaacaaacagaacatagcaggaagcaatacttcagaagcagacacacaaaagcataaacataatacttactgagctggctgggatgctgttgcaggtgtagtagtttgtgctgctgatggcctctctcctggaccctagacattaaaggaaaaagactttttaattactcattacaatatctggtgacaatactccttagtgcattaaattgccaagtgcaatgcttaaaaaatataaattcagcatatattcacacagatagattctcaaaacagaagagaactcacttgggccaagcgctcctccctccgagcatttttcctctccctgctagccttgttcttggcacgcttcgcctcaaactggtcagacaatgtcttttctcttgccttctcagccttggacttgtgtatgctctccatcaagactctcttgttcttgaaaacattacctttcaccttcatgtacatgtcatggtacatgtgcttgtcaatcttctttgattccctgtacttgcgaagcaagcgcctgaggacacgcatcctcctcatccaaaggattttggtgggaagccttgcctcccttgtacccttacgcttacctaattgtatttaggcaaacaattaataatcaaaaccacaataccttctacccaaaaggccaaaacaatagaaattcgttacaagtgcagcccaaccagcaaatagcaatgttcatacaagatgcttgatttaatttttgttttcatttgatgtgtttttactaacaatcacccaaaaatgccactttatttcaccttacttcctgtttttttaacaatttacaaagaaaatagtgaagacaacaaaatctcattttcaccatttccttcccaacaactgggaaccaggtaaagatctgcggtaacattttttttttttagattataaacgacaactaaatcacctaatctagaaataagatccgctgaactatttagaagaattacgacactgatcttttaaattataatgcaactcagtagagtgttgtgaattttgcatgcgtgataaatgagcattagctaccaaattaccagggaatattcagcaatgtgtaatgtccaaactcatgaatttgaattcattaaaattaatgttgaggacttgaggatataaatacgaaccataaccagagtgacgcccctttctcttggcctccttcattcgacgagcacgggagcgagagtgaatcttagtcggcttcctgataataaacccatccttaaccaacttccttatgttttgtcctaaaaaaaggcacaaggaacagagcacgtatcaaacataacttaacaacagtatcaaatcaaaattataagaaagcaaaacaaggagagaaagagagagtacgagaattggccatggagatttcattgacttcatttggatcaagccagaccttgcccttgccgcactttaggacgctagcggcgaggcgcttctgaagcttcaaggacaccatcttcttcttcccctctgtgccgtgcaactgttaccttgcagaaccacaaagatacaatttagggtttcaaggtctccgctgggccttctgttgttaatgtggaagcccacaaattataactgaatagggccttctaagactatcactcgcccacttttttcttcttttttttttacattttataatatgaaagttggagttgagcccacaacacaacaaaaaaacgagttaagaataatttgagggaaaaaaaattaaaaagagaaagaaatgggggcgtataactgtatatgtaagatgggagcgggtaaatagcaactcccccaatcccaaaaatgtagattttagtatgtcatcacccttgttttttttttatcagcaaataaacttttatttattaaaaaacaaaaaaataggatacaaggagtatcctatctttgatttgttactgcaaacaactatccgtagttcctactgatacctcctcaatatatatcttctttccatcccttgttccttttagtcattggccattattgaggaggattaattatgttttcattcatttttttttgtcaattcttgtgtttaatctctaaaaaatttaattgatgatagtttcttataaaattccatctgcctcttaagtctttggtttagatcattaatacaatcatgatgatgtgactatcacattgacatccacattaatttgtcactgaacgttattttagtcttacatcatagctacgtgccaaaatattgtttttaatttttaatttttttttgtggttcaaacttgtcggagaagataaattgtgaaaacggtccctaattttatcatgatttatatgtttttagtctaaaaagattgtttatatttttaatctctataacttgaactattaaacttaatagatgtgatgagtctgtcagactagtgtaaatccatccgattgtaaggcttagctttaatttttgaacttgaatgaaatgcaggcctttttagctcaatccaatgaagctctgtgtgatagttacactactaatttattttattatttcacttaagaaaaagaaataaaagataaatagtaatattattcttgatgtgaaaagctcttttaggttcattcttaacaaaattatacaatgtagtagacaacccgatcgaacgtggccaaactagccttactcgagtccaattacgacacatgttttgtgctaaaccgtaaatttatatgaaaggccacaataattaaagtggttaattgcttaaatcgtgaagttcaaggtttaatatttaaaaactactagactaaaacatcctctaggcatggcaacaaaaggggtggggacagagatagtgtctccccattcccgttttaccgtgttgccattttctatttcattgtgaaaaatgaaagtacaaaaatgtagagtgaaatgtgtaaaaaaacaaatctcttgcaaaaaacgaagaagtaagtttatttaaaatgacaaatatatttattcactgacctctctttcattacattgaaaaaataaaatttatctatcataaatatatttctcctctttattttaaccaacatgagaaatatagaattataaatgcttattattttctcatcgaaataataaaaaatatcaagttgaatcatgtgaaataacccatgattgtaattaaaaatatgaaaataaaagaagacagaatagttatacgatatacttttagatgttatagtattatcttttaattaaatttaatctcaataagtcaagcattcaagagggaaaatagttatatgtttaagactcatatcctatttgttttaactcatacaactttattttcggatacgtgagttgaaaatgtctcattttatgtgtttgttacatgttataaaaaattattctcatgcaagatctatttccaagaatagatattgcacatgattttctctctctttatttccatataaaagagtgggaatgttatattctcaggggaatgaaagataactttatattttcactttatttattttatttttaattgaaacaaattttaaaatatgtcaaggaatgttaagtagttaccaaatacgttgataggaaataatatttgaaggaatatggagtataatttagtctgaaaaacaaatgcctcctaaattatgatttttgaataatttttaattaataataaagattattattgttaaaaatatattagagaaagaatgtattaaaaatataagttttgaaagtgaattgcggagctctactggatggagacagtgttgtcggttcacgctgtggtgcatacaaacacgggttttatactagagatacaagcagagctgacctcgtacgatgctactgtggtactacgatatagtacaatacaacacaagtacaaggtttttaacccaaatccataggcgcccaccggccgccgcatctgttgttttgttttgttttgtttatttccttccatgaaagagaaagaaacttgcaacttcccaaaaccagctgcgctgcgccacttgattctttatgttatgtcattctcaccatatgcgtgtattgactgctttggcatctcatcgcctcaatcatccaaaatattattacgttatccacgacaagatccccccccccaacgtaatctccaacttcaatgattaacatttttttatattacaagagcatgtcaaccccgtttgatcatccaatcataaacttctttaataaaaagtttcaatatctaacaaattatcaatattaaaacttcatctctttgatcttaatccaaacatagtaaaaacatttgcaatttttgtcgagacagtatattaaatgttttttccggcgcgtaaccaaaaatgcttggaatattattcccattgtaggacctcacgcggtaatgcttgcccgagtcatgctcttgactgttctccatcctcgaattagggatggagacgacattaacataaacaacaagtggtatgaattaatagataaaattcaccgaaagaataattggaattggaattcaaatagacttgaatatatccagtaaaattactgttcaacataccaccaaaacaaaaaattacaattcaacaaaaccagatgatagcatagcactaactaatgagaccatttctaccgaagcactcaatttaaattcctgtgcatccctgccaaaacgccagagatgttagtttagtcagcagaatggagggagaaagcaaaagctttcacagcattgacgaagaaacaaaacacatgcatgaaaagaacatccttgatatattcctcgctaatcgaaactccagagatccccaaccaagctttcctgaacattattcgtcgtggattgtccatcatagtacggaatctgataaaacttcatgtaattttcgtacgccatcagctcctcagaaagctccagcactttgttcttttcttcttcagcttcaataacctctgtctctttctccttcttctccattaccgtgccacccaaataaccgttcccgttctgaacggaccccatgaactccgttgtcgaataagcaccctctgaacccgacgctgaccccgaattttcatcaacggagacaaccaccgagtcagcgttgacggcgtccacgcgggatgggaacgcctccgcgtggttcaggtcgtaaccgaactcaaagttgagatttttaggggcattgttgagatcgcaacggtactgttgctggtacaggggagggtgttgtggagcgaaaggaaggggtggaattggattacgagcttgaatggaatattcgtcgtcctcgttggggaaattcaccttagcctttttgcctcggatttttcgagcttcacgatcgtaggctctcgcggcttcttctgcggtgttaaaggtgcccaaccagacacgaaccccttttctaggatcgcgaatctccgcggcccatttgccccacggacgctgccgaatccctctgtagagattcttcctctgcctcttcaccggcttattctcaacctgctcgctaactgttcgaacaaaatcacagtagaaaaagaaaaaaatcttaacatgtttaaaaaattaacagggtgaaaatgagcgagtgagttagtgaacaagactaacctttgggaggttgggaccttttgagagtggagggttgttgggtagcgatgtgggagtaatccaagtcaaagtcatcgtctttggcgaaggagtttggccagagctcggaggccgtgaggcggcggcctccacggcggggtatgaagtcagcgatgatggcaccgccacacataatgattaatctacgttaagaaaatgagtgagcaaaagaatgggtttttgtaagttgggtgtggaatgagtagagtagaagtgggttgtgagaaattttggagaaaggtttcaagaaagggtttttatctgtaacaagtttgagaattgagagtgataggacgtgaggaataaagaaggggtggagtggcttatgtagtaggaaaaaatggggaaagagtgcgtgacagatacattgggaaccttccttcctacaattcgcttttgtttttgtttttacttttactttgccccaccaaattgtggcttgtgtggttggcaagcagccctcaatataatatagagtcttcttaaccggtgtttttaaaatattaattaatttaataaaaaaatatttatagtaaaaatcataaaaaaaaaacataaataatatcataaataatctaagtttatacatttcaataaaaaaattattttttaatttctaaaccaatcttctaatcattaattaacatttacctataatataaagtctaggctctacgcacttataggatattcagcacattttattaagaccacttgcgaccgtgtacaagccgcattttgaatacattgccataaaatatctaccttgtcttaattcaactcaaattctatatagtcgttctgctaactttcaaaaaaaaaatcatttggtcaaaatgtaaattttttatgaattaaaaatataaaaataattgtgtgcttgcataaaacaaataatttttttaattaaaaaatataattattattttaatgtttattcttatttcataataagcgttttatcattataatttggatgaattaaaatattttttttaccattagtatataaatatataatattggtgatagccaatagccatttttggttactactttctttactcctcaattgtaagtaataattaatctcactctctccattttataattgaaatttcatctcacaattgcacattttcatttctttatttaactttctatttatatttttgttttaaaagaaatataaagagatacaaagtgcctttcttgcccctggtatagcagtggtgattgtggaataatatatatgtagtaattgtagaattatagattttgttacatgtataattccataagaaagatatattttttgtatagttatattatcaccctagtaatcattactaatagagtgaataattttaaataataaatatatcatattgtcaattttattatattaaaaaggatttttaattgttttattttctattttaatattatttataatagtttttagatttagattttatttagtattatattgttctcatttttctaccctcgtgagaaaccaagtgtgtctccttttgtacaccttataatctcacattaaaccaacaaactttagtgatgtcattttgtcaaaagattaattgcgcaagaagagaaattacaaacatcacatttccaaaaatttagatggcaccgtcgtgaagctttattctctcacattctcgatgtttttaaccttcattttttttatcaccgtatcctaacttaaaataatcaaactctccatttattcattatagtatcaaacatcacttaatttcaacaaatgtatttcaaggaagcaaaatctatgactattttttcactagtaacctcattaattattactaaaaacaacgaagaggagggttaattaatgaataacgagaatagtaattgggtcaaagaggaacaagtcaaactcaacatgctgaccaaatggttaaaaaaaggcaagccttaagaaactgtcgtgaatagctcatatgctacatgatagatttgaaagaagagagatttaataaagtcaccataagctgtaaacgtctagatgtgatgagaaactacaagcacatcgtaaggccaactcgtgggcaaaatccacatgttggtagtttgattaaaaagacgtcaaagagttttttagactttgaatattgagataggttgctaataaacatatagttagactgcatatttttcttttgttcttttagcaacatttgcatggagttcgcaacatcgtgagtttataatttatcgtgtcgttacacaatttaattattattaaaggaaaacacgtgttggtactccgacaataaagaagacatcaaaatagcctttttgactttgaatgaaaaagattgctaaatatatagggagtttgcattccttttatttcattttaataatattgcatggattggcaacgttttgagattatattttatcctgccatcctaacattttagtaatatcaaataataaattatcctattactatattaattattttgtacctttaaattggcagtactttctgatatactaattattaatgtaaagggcttcacatgtgttctaaacccaatccaagattctggtccgaaatgcagagcaacaaagatgggtccctagcccagcccaaatttgaacaagttgctcttactcgtatcttgatttaacccacaaagcaaccatctcttaaaaatcagtttaattactatatggatgatggatccctatttgttttctatttaattgagttcctgaacttgctttttttttaattagatctttaaacttgtatttattttttaattagatttctacattagatacataattaaaaaataaatataaattcaaggacctattaaaaattgtcaaaaagctcatagactcaatttaacctttagaatatgaaaagtgatattaatatactgttttttttaacaaatatcaatttaactcaccccttctaatattttttattgtttaaaatttatcaaaaattataaaatcatgaatatgacttattaattgaataagaaatgggcttcataaatctttgtgatttttaataaagtatagttaataataaaacatatacttaaaaatatatgttaaaaaaattttgttgcaaacatttttctttaaaatatttccagtagcttcaacacttaggatctcacaatttttgaactattggtgcggatgagcgtttaagaaactcgactttgtttgcatggttataagcatattaattacttgcacctatatcttatatataaagaatagagaagcaccatatctggcagatgagttagcacaaacagctcatgttaggatggactcttgaaagaatcgggcgaatttatgatggacccataaattattagttcataaacaactagtcttatttggtatgatcgataatctttattattttagttcttttcttcaaacattgtatagaatttgattgtaaatatgtagcccataagaaatttggattaacatacttacttttacacctggactcaatagactttgattcaacgtggtccatcttatcacctctacctaaggattgatatgaataaattaaaataagttatctttatcgagtaaaggtgagagttgtctctccctatacacactattttagttacatcattactttttagttgatgtggatctttaatatgcattcctcatgtgaattggacatttcaagcatgaaacttacaagaacatacatttgtgggtcggataatagatacaataataatcttacaacattcgttaaaatagactataagttatgagtgtaactcaaaattacaaaattaatttataagataaaagctgcctatttatatacactatgttgtccttgacataggtctacttgagatctccaagataactcccataatttcacattaagtacattagtctctggcaaatattcttgccgtaggcagcaaatttttttatttctggctttgtactttttaaccacttctggctttgtatttgtactctacgttcacatggcactatattgcctgacttttgaacatatatacatattgtatgatgccaagttattcatcatggtaaataagatgtcgatcagtagtcctacgtttatgaaaacatgcttacctaagaatttatccatatgcaatccaatacggtatgtaaaatccgaatcgtgccaattaactttcagttttatagaaaatttcatattttttaagtgtatacacttattttcgggtgcaacgtgttctccattaaataggtgacccagtcatatattcatgtatttaaactttttcatgaaaggaaacactctgcaaatgtaatccaatgccctgtacagtatctatagatgtgaaaatcacgttctaggccactcaggacatgctattgaccatgaattttgtggtttcgaagtccttaacgtgctaccaactatctcgctgaatccaatgattcatattcatatattattacaatataccccttaatttccataatgcattgtgagcttgttagaaagtgattagactataaatacccaaggcatccggtgaattgggtacctcatcactactttgaagcatttctttgtactccttcacaaaaccattataaatggctttccttcgatctaccttggcaacctcaatggttcttttagcaatgctatccattgcctccgcaactgactattatggatatggtccaacaccaaagcttgagaaccccaaacccaaaacagatcacaaatttgacgacaaaccacaccctacagaaccagattattatgcagtgcccaaatcaaaaggaaacgatgaactacatctgcttcccacaatcattggtgtccaaggagttgttttatgtaaatcaggctccaattattccccaattcaaggtaattttttcattgatgtaattaccctatgtatttttttacaacatttctcatggcctatgttgttaatagatgtttattttcattctttgaaatcaaaactaattaatttgctacctcttttaatttttagatacataaattattttttacttaaatattttctctttaaatattcatgagaaataattaagttaatagagagataagtaaagatgattttaaaatagttgaaagaaaattgtaattagaaagggaaggagcaggtaagtttggactttggtgatgtatatttggtttgtttgaggggtgtaggagccgtggcacgagttacatgtggatgtgaggatgagcaggggtacgatacaggtcctacatcagtgttgagtcatgtgacagatagtaaaggttatttcttggccacattgtcatttggatctaaattgaagatcactgagtgcaaggcatacttggagacttctccattggaaacatgtaaagttcccaccgatgtcaactacgggatcagtggtgctcgcctctcttcttatcgcctccttcaaaataacatcaaattgtactctgtggggcctttcttctgcacctcccaaccactccctaacggttattaatgaagagcaccttctctatggcgttcgttgaaatggctgcaaagtgaaaatgatgattttattctatttctatttgttgtgttttttttttcttctgatattcttttgtcaagtgttgatttcatatgtaattcattggcacgaagaattgattaagcctccttgccctttaatagatttaagttttaatatgttgttatgatattggtacctaaaccaaaataaggttctctgtcttgtttagttttctgtttcccataatttagtccctgttggaattcaaaccctaagacatctaatacaattgcccgtaagattgagatctcatttaatgagaaacatatcaaatatatatttagaatttttttttatatattttataaatactctgattcacaaggatcatgattaagaatttttggatgcctttcttgaaaaagaagttacaaataatcaactattgttactcgaaactttagtgaaaccttgatttaatatcccatttttgtttttttgtttttgaaaaaacactgatagaataaagggtttcttcaaacaagacccaaagcttctatagcttccatgttttatctttgagtggtcctaaaaacataagaagaaatgctcgattaacttgtaaatcacattttttttttaatttgttttatttacatctgttattaacttcgtcccaaacattctaagactttaaatgatttttgctttttaaagtagttgagaacttttctttattttcatccatttagggggaaaaaaaatcttgcacctgttctcaatcaatctcgaagaaggaaaaacttaacaacatatatagagggaatttggtctaatggaaactatgactacaaactgtaaaatgacatacatgttgttggaagtgtttcaaaatcaagagttttctaaggaagggcaaatctcgttcactattagaatttacctatcacatgcaaatttccctacaattttttattttatttttttcgaaaattcacaaaaaacatgtttcgtgtattgtttcacatgcaggaaattctattgtggatagcaagtttcttatggatttcaagataacgatttttgaaaaataattaacaataaaaatgaaacaatagatatataaaatatggatttgcaaacttacacacgatttttttaaatatatgaatgcattaacaatttataatgagaaatcaacttaaaatatatcaatgatgtagttttttaactcactcatacaaacaacacaagcatgtatacattagtaaatacttacagcatttgttaacatatacatactttttttttaatataaacgcattaaaaaactatatttaaagattcagttaaaatacatcaatcaacagtataacttactaacatacaagtactaaaaaaataagtgtgtatgtttagaaatccctataaaataatagctaaatatttttatttccttattaaaatgtgtattaataatattttaatgttttcacattcattatatgacataaaaatatttaaatgtatattgttagccttcttgaaattaataatcaccagcacaaatttatatatgcacaaaaaaataccgacgtgggttcaaaacaagtaaagtaagtaattaataaaagaaaaaagaaaaatacaacattatgatagtttgaaatgaaaaatagggggaaaaaaatgagacatacattcttaatttttttttttacagcagacatacattctcaattaaacctttggcttttcttttcattttctaaatataagatagaattagctagcaatgctatagattaaaaaaataggaaaaaaaatacaacattattgtttgaaatgaaaaatagggagaaaaaaaatgaacactctataacccatatatattttaataaaattatctatatttgtgtcaatattttatatttttgtatttcctctcttattttcaagataaataaatacactcttatttttatgttaatatccctcacttatttttatgtgaagataaataaatatattttttattttaatatttatacctcttattttatgtgtttgaatccattatttttttctcactttcttacatgtttattattattttattacatattgatttgaaagtctagttttatcttttctctaataaagtcaatgttgcttatctcatacatttcatttctcactctctttattttcttttcacacatttttcttccttttacgactcttggttcctttgacaatgctttgttcctattttacattgtgtgagtaagttatagcttgattcaccactttttctcatagacacatcttgattaagcatgacaactcttatttgaaatttgtgattttaacatttgtcataatttttatatatatgataatttttattagatttttttaaaatacattttctctccattgatccggatccttgatctgccactgcattcaaaatacacacgatgttttaagagtttaacttttgaaaattaacatgatgttttaagagtttaagttatgtttttgatatatgaaaatacaatattccttttcgaattaatatccgtctttgaatgggtggaacctattaatgcaatgaagttcaaggcagtggcactgactgactgagttgagcagagtggaggggtgcagttgggttaacatacgttgaaaatggctatttaaaacctgaggtttgggtcaagttgcaagattatgatgaaatttcgtggacgaaaaggaaagtatgaaaaagagtgtattggtattcaaattgtatgaaactataacaatctctttatctctctttttattacatgcatcactcgtcttatatatttacacttctttggaatataaattgttgtcaaactttattgtacaaacagcataattcaactttaaattgataatacgaaagagtgtgtattaattgttggtccttctcaacagattttacgaatgaaacacgacaataaatggttgcgaggatcgagctcagccatcgaaatgatatatcagagttaaaaagtagaccttataaaggctaactttgatacaaatatctcccacagctatacgtattttaagcggagtgtaacatatatatatacacttaacatgaaatagctaggtatcctatgctggcaaagtgttaaccaagtaataacaaacgtaaaaaaagttgggtcctgaagttttagacatttatttctcatgtacatgggtatatataaacattaaacaggttgcaaccccggccccagtaatgggattgttttgttttaaatccataatagataggacaaaacaaaaccacccagaaaaaaggatggccagtgttaaatgacccaagtgttagtagagccatttgatttttattagtaggattcaaatagaaaatgagacaaggcagaaaacattagttcacaagattgctaagtatgtgtaaaaacagttgtttttaccttcaaacatatggctcaaaaccaataacatcggtgagggataccccaaacatcctcttcttaaaaaagtcatgggaatttttaggattccatggaggaagagcatatacccatgaagggaagaagagacagtcccttttgcttgtagaaaacaggaagccttgaaaccaccatggaaagttcagccaatccattaaacatagtcacaacaacactatagaacaatttacccacatgtatgcctccatgagtcaccaaatctctgtgcatatcagttcggaagaaattggtcatggccataattgccaatacaacaagctgaaaggaggggaaagttgttaaataagacaataatagcattagatgataaaacaataaaatgaaacttgctaatcctacttggcaaagctttaaggtgtagacaatattttctggataagcaagcttttaacagctccgattttcccactccatactctctggttgtcaatgcagctgggtggcttagtcaaattcggcagcaagtttttgatcaaggcttctcccaagacataattttcaaggtcagaattaaactgttaatactaacttatactattgtagacagaataaacgcaaggacacttcttgcaaaaaaatgggccatacctttcctctcaagacatttaaaaccccattaattcgaaaaattcaagcatgttgttcacactcacagggaccctgactacaatgttttttttgtcagaaataattttatatatggcacaagcagtgcatcaaagtacaataacataaataatagcacccaccatccataaagtgccaacatacactacccatccgtcatttactgccagcaaataaagccactccaaagcgcacctaactaacaacataagagcaatgatcttaacctatacaacagccaatttagacttatgaagtgctacagggtcatgaatgaattaactattactgtacaagtgtttcaatatttccttcatataagcttcacctcccaagcgtgaaataatctgagcagcccctccccatgtggtaccgatgtcaatgacccttgcatatacaaccaataaactatccatgcagcccttatgacaacaaaccgtggtctccgtccataatgcaaacaccttgtattggcagtacacttggttaaagggataattcaaatcctttcctataccagtgagccacgaccatgacaaaaacaagatcagatgcacccatttacatgcttctcaaaatactttcctttgaaaatacaatcatttctataaggccacaaacaccaaataccaggcacaccatacaattgtccacctttctataaaatgcttaagattgcaagtctcagtgtcataaaaaatccattagtgctggctgcatgggtgagatgagtgtggttcctttgagaatgtgaacatattgcttgagtgacataatttgaaatttgaaagccgttgagctatccaaaccaggggatatttgatagtaacagagcaacaccagaagaagaaatagagaaagcagcagacatgaacacaggggtacaaacagcaaaaccaaaaaggaaggttaccaggcccgcgtatctcagagattatgcttgaggaaggaattacaaatgatgaggagctgagctggcagcacaggatttgctagatcacaatgtcttttgttaggaagcatcgagaatcaaattccgttatgcagatattcctgcaaatctggataattacatgtagcaattggcattataaatatatgtaaataactagcaaatgaataagaacaattacgctccttcttcctcattctcgtgattctttctctgcccttttcttctttctgggaggcctctggccctcgaagccagcactcgagcacgagtctcgtaccaatatttcatcgatgaaaagagctttagctgatcccaaccagcatccatgtatttacaaatttataattattaaagaatatgacatataatcaattttctggtgattaaacaatatacacttcaagtttgaaatcaggttaattttacctgttgtaacacatttcctttgtccaccagagtttcctcttaacattgcatttcctacaacgtatcagtgcaaatctctagtcccaaaatctggaaatgaaacaagagactttcaaacaaaatattacgatcaattcgtgaagatcaatgatggcttttaaattataaattttacccataggacataatctgttatcaaatttgccttatagccttcagatgctatagcctgagcattgagtcaaaagaacaaccacttaattatcagacatttctatattgtatggaaaagaaatatatggtgcacttgatttcaacataactaactgccactgtaactgagattagaaatagctgttctgtttgcagtgatcacctacaattggtgagaaattttgaaataaatagcaagcagtagaagaatggaatctcgaaaaacaaacagctattgatattaaaaggttgtcatgtttttatctcccttgggtttgaaaggttaccagctattcaacaatataataggagggacaacagatgcatgtatatcccccacaaaataaatatgtggatcatgcttgatatttgcctctttttcttctggccaattccactaataaaagtttgcaatgccaaacgtattatacacaatcaaaagttaattttcatctaaaatgccagtctttgttttcaatattgaattcagtgtgtaagcataaagagatccaactccttggactcttggcaagaaggccaaggtttctctaagtgtcattcatccagatgcagacattttgatggaccagcagttctttggggtacaagctcattcttcgcctggtcattataagttacctttctagagaagtaatcacgaagttgtactagctagagcttttattaggtacgaaattagctagagctttaaagataagaaaatagagctaaaaacatgaaaacattgttaaacaaaatatacttttccccaatgctctaacctttaattatggatcaagtttccagccaaggccaacaggagtgtgtttttcccagaacttgtagggccaaaaagcaatgtcattcaggagaaaagcaaatggaaaaacaagttagatgcattggttccaaaggtcctatagctaattatggttttgtcctccaatgagagattaatcaatacaacaccattagagttggtaccagtcaggcttccactaacatgctggagaatgtttatatgttgttttgtacttggaagtatatgaagatagttcaacataccctttaacaacaaaagtgaaaccaaattgacaagttaaaatctccttccgtaagatcatttaccaagttctactattatataccactatatttttttcattttaccgaacatttattagctagtaattccctcaaaaacagaatggtgaaatgctcctctacaacaaagttggccaagacaatctaaatccttattatttgaatgcaatgaaaactgaactgtagcacaagaaatgccactatccagtataaaagagtctgatataaagaatataccaaactaaataaataaaaaagaagtaaaaacctccaactaaaggagcaatacttaaagatatatagataaaccccacagtgcataaaagaagctaatacttgcaaaatcattacaatataaaagaagcaaagattccttaagaggagttaaggctaatcaagtgtcttcccgaaattaaattgatttatcttacaatcaaattgaaattgttctaacttctcattttcttaaagtagggtcatcattcatcaaaggctcttaccgtcatcgaaaatcccatcgggattaaaatttggaaattaagaattcaattcatcttgaaattgaattcactaataagagtcaccgatcccgattcaaaattttgaacaaaaattcagtcagattgaatattgcatcaaatactgcatttggcatcatcaagagtcatcaaatatcctatctggaattaaaatttcgaaataaagaattcaattcatctttaatagggtcgtttgggaattcatatagaattcaaaatttcgatcaaaattataaacaaatacacgtcatagttccaataaggatcctgactggctattccaattagggtcattgaggattgagggtcattttgaattcataaagaattcaaatttgttcaaaattatgaacaaaattcacattataatttcgattaacatcatcaagagtcattgaatcataatgaattttaaaataaagaaattgtacttgctattgaatttaggatcaatgaattcaccaaaatttataacagaaaatcagttctctttaccagaaaattaatggtcataaagaattcataataaatagtttattcttgtcacacaatttaagattatcgaaggtcattaattcataattatgtagacaatgtggaaattttgtttgtccgattttattgcaaattatatgtgcatcggaaattgttagtgtgttacaagcactctttaaaaagaaaaatgcattttaaaacgcacaatacaacacaaataaagaaaatagagaacagatgccttaaccaagactcatccaaatccaatcttcagatacattcaaatgaagagctttaatttatgactggagcctgtgattttcttataagcacttttcagttttcacaagcttttatgatgcaagatcttgtgagatgaacatatttgatggcgtacttcattaagcagtttaacaaaatgcaatgcaccctctatttatagatagaccaagcaccttcgattaccaaattatcaacgacgttgtcacaggtcacttgcagttacgatatctcaattcaaatgcacgtgtaattggcatatactttcaactagcgtagaacacttgcaagttaaaagaaagttagttcgtattcaaattaaaaaatggggttgtctaacttaccacaagtaaagatttgttaattcattgacaagtataccaatgtcataagtaataaaattaaaatgaaagttaagtgtcaaatccatgggagtcattggttgtacttaagttgcaaactcaattattaagcaagaaattagaaaaagtagaagggataggaaattataaatgtgaaatttggagtaagagaaggaaaaaaaaaagataacactaaaaataaacaatgattaaaatgaatgttgggacttaacatgccaaaactactagtaatgcaatgttagaaattttctctatctaatgaaatccttatttctagtcacatctactaagacattatatctttgattttccgcacgaagagtctagtttatttattatttttttcaaatttctttgcaaagataaaactaataaatcacattaagataagagatgcaaaatttgggcaaaacaaatatcaatctatttctagcaatgaatttatttaaatacatttttccagttcttttataaaataatcatttttcaatgtattactgtttaaatattatatggatgatcaagccataccataataatagaaaagcatgtagaaaaataatagaaataaaattacattaagtaaataatagacaaagttacattagagtttggcatgccaggctcctacctataggagtttaacctctcataaacatgagagactttacacttcagggactaaggtgaatggaagaaaggacggtatgactaaaagaaagaaagggaggaatgactaaagtagcttatgcttccttatgcttcctacttcttttatagacctaaagtagtttattttttttcacactttgtccttagtgtgggttttcgagttaagcgcgtatttgagttttcttgtaagtcttctttgcgcttagcctggattgcgtgctaaacgagaatacgtgttaagtctggattgcgcgttaagcaagctgtccaatttttccaactttttttcaagactttttcttcaatttttgcatcaattttcctctaaagcacttgaaatcttcttcttttgacttctgttaataaataattacaaagtgaagaaattacaatcattattaattaaaattaactattaaattaactcaaatttcacaattattaaaatacaaccatctttatgtacatacagaattgcaccaatcgtctaatacatactaccacatttttactacttggggtcggttagacaaccactactcggtattacatgtctcattttatatgtacacacttctttggagtgtaaattgttgtcaaactttattgtacaaatagcataattcaactttaaagattatacgaaagagtgtgtactaatggttggtccttttcaaaagattttacgaacgaaagaggacaataaatggttacgaatcgagctcagccatcgaaatgataaatcagagttaaaaagaagaccttataaaggccagtataactttgatactaatatttccgacagctatacatcttttaagcggagggtaacatatatacacttaacatgaaatagctagtcatcctacgcttacaaagtggtaaccaagtaataacataaaaaaattgggtcctgaatcctgatagttttaatatatatatatatatattaaacaggtggcagccccggtcgaaagagttccccccaaaaaaatttaattagcaagctggtgggttaagtatccctccaaaaacagctttagcattggagcaagaggatacaaaagttgtattgtgaggaccgccagaataagccaaatctacatcggctatctcaacaccctcgcaggggttgcttgtgctgcattgcagggacactgcaatgtttgagactgtagttccttgtatcttacggaaatgaatattgctgatcttccacaccgaagttgatggctgaacatttacatgcatacatttgtagacatcatagttagatatataagaacaagggtacaggagtttcactcagaattaaaacctgttatacataaaaagttcataactctgctgataaataaaattgcatggctaaaagttacgcttgagagtttattttttgcttttaatttttgaaaataatttttattttcaaaattttaaaatttagaaaacatctatcgaaaaaaatattactatcatatttttatttcttcagaaaattaaaagtcgaaaatataaatatgttgttttcagttttagaattattctttaaaatgtttttatttctaaatttaaataagcatattttatattttctttaaaaataaaaaaacactccaactaaatgtcatcgaagttgcttaccgttgtcttcttgttggagccataactctggtcaataatgataggattctgaacacccttcatgatgagaccttcataggtaatgttcgtagcttccgccggcactgtccccatccacgttttgattctggcaccgttggtcgtattcacgaacgtgcaattcgtaacgctgatgccgttcacgcttcgctcctctggcctcttaccaaggcttccgacgctgatgccatgaccggggccgcaggtgatgttggtgatggcaatgttggtggtgctgtgtccgatggaaatgcagtcatcgccggttccgataacgctgtcgaaaaccttgatactgtcgctcgagcttatgtgcatgccgtctgtgttcggactgttccccggcgctgttatgttgatgtttgacagtgaaaagttgctgcatccgtgaatgtggaagtggaactgcatgctgttcaacgaggtgatgtccgtcactatggaattgttaaccttggcgaatttcagagactgcatgcatttacaaacttgtcacttgtcgctgaaaccttgccaatatattcattctctccaaagcttattcgttcaaaataattttttctatcactcaaaactcgaaagtttagactttagagtattaagagtaaaatcttttgaataaaaaaacataatttaaaaaagaaactttattaaaagtagtgaattgattacgttgataaaaaatagttatcactaaagttaattcatacctgcacctatagcataataattcaaattttgttgttgtttctttatcttgattaaagaaaacttaattttgcctttggtctaggtaaataatcaaaagaaactctttgcaattttatgcttgtcataaaagaaaaagtgtattcaaaatcatctatttactaatatggagttgcaaatttaagaatatgcttacagctggaaggggagcacaatcgcctttggtcttggcgcagtcgttatatggccaactagcggctccttggccatcaaaaactccattgccagtcaacacaaggccgtcaatgtctagaaagctgaaccattctggagtcacatactcagatggatctgtgttcgctttaacagttcctataacttcaacaattataggttttgggctggtacatggccctgcaaacatagtttgtgctgcacgaaatgttcccgctgggatcaaaacctttgcctgagtagtactgtttttgcatgcttctccccatgcagccctaaatgcctgcatacatatacatatatatatatatatatatatatatatatatatatatatatatatatatatatatatatcatagaatatcattcattaaatatgtcttccttgactttatgatcttgtttgtgagtttcaatattcatttatgttcatcatatatattttaattagttctttatgtacgtaacaatctcaatttccctccattatttcaatcaatagtttgattatcaattgtccacgtatatgtaggtatttatgcatatagtttggaaggaattctgcatctagctaggaagataatgaaataaattaaactcacatcaatattgtcagtctggtcatctgccacagcaccgaatttcgtcacatcaaaaattgcaggaccattatttggaactggaaggaggaggctacggcgattctcaacgccacgcgaagatgcacctatcaaggtgcaagagaggagagcagcccctaagagaaaaagggccctcgccgtagccatggtgattaccaactttaacctcaacaacacgaaatgttaaagttttaaatcacagcttgtggcttgatattatgctgttattgccgcgtactgcgatttaaaagctatgttctatgtttctggacgagttaattaacgtgacttgaaatattttatatacaagagaacttacctcatgctccgccaatgaaatctttctttggcgactttagcccaattaatcgggatattacagtggaagttcttaatttggttttagcttttctctatatttagtattgccttcctccacatttagctacacaattatcaatctgctcaacaaaaagcttaaataattagcgtgcataactagcatgacctctatacattatataaggttgactttatattgtgatgaaaggagaagattaaagatcgtgaattcgaatcatctgttaacaaagtaacatttaacgactaccatttgttggtaaataaatgttatgtcactgattatataatattgcaaaacacacacaataaatatatatattttattcacccatggattcaagtgtaattgtgttgaatcttttccaaaagggagaaagtgcataactgatctcttaggttgtgattatatatggaaataaaaataattaagtaattaattacatagataaaaagatgtaaacatgtacagaaaattaaccggaatggatcatcttaatgcttatcctgaaaatccttgaaagacatgcagcaatatcggaataggagaaggaaggaactggcataaatttggtgatatattcttattaatttgttcattcccaagcagattgtgatgagatgctagaggatgccaatgatacataagtggatgagcaagacatctatagttctatttatgaattatttttttacaaacacttttgaatgttaaaaatgctaagttttgaacgagagacctttaaatcactatattacaaaattcaatgatcaatttcttatttaaaaattaaaaattatttttgaaataaatgttttaaaaacaaaaaaaaaagcaattgaaaaatatctttctattttcatattattcaactcttctccactaaaaaaaataacaattaacatttatcaataaaaaaattatactatatatgccatatgttcttctgtgggagagataggtcgaccagttcttttattggactgctcttggtcgacattgtgattgtcaaatagttgaagcatgagttcatctcatcctcgaatagctctagttgatatatccaccgaacaatgtagagctactctgctatggatataggaacgtacgatgcagaactgggtaggaccaatatatttatctccaagtagagaaatactcaattgtcacccaaaaagaaaaatcaagtttctttcttcatagtttttggaactaaaaataaaatttcttaatggacatcaagacatgcatgtaatcccaacaaagctataaacacctttctgcgcggctttaaattgtgaaattaaattcaatttatgataaaactttgaaaacaaataattgattaaatcattttcatttgaatcaaaggaaaaatattttaataaattaacttacttaaccaattaagagattttttttgttgataaagaattttcattaattttgttgatgattaatatttattaaaaaatctaattaatcacttttgataaaatttcttctctcaactctatttttttaatattcagtgatcatatttatggaaccgaactcaattccacctgggatatggtggtagttgagaggacgattatttacgtttagaaacttcaaactgtcatttaattcaacaacactatatttatgaattaggtgaacgcgtatgatccgattatcgttgcactatcatttttttctttggttaattgtataagtaattttttaatcatttagtatttttattaatatttttttacttttttaattatttgatttatgttaaattccttttgtttactattgtttgtatttagttccttctcagagatgagagaccaaaatcatatttcttttcattcttgagaactaaatttattgatataaaagtataggaaactttaccatgcatgtttcactaaaaatataagaactaaaaaatattcttctcttttttaaattgtgcttgtatttgaaattacttgactcttaactatcccttcttacttgtccttttttaattattgaaaaatgagctagcaacaaacttctaatatgtggaattgattttttttatttataaaaataaaaaaatagatactaaaaaatttatattctacttaactaattgagttaaatcttttatgtatatgtagaattggttgattcaattaaaagtggatttgagacgagttaatattagttttaacttggtctaaaattgggataagagcatttatttaaatatgacttgaacatatataattcaataatatatgatgcaatatttagtcaatctgatctgttaatgtaatagaatatcaatttaaatattatgaataaataaatcttagaataaaagatgtacaaaatataaattgagatatattttattaaatatatatatttcaaaataaataatttattataagtatgatattatattatggaaaatataatttttgaaacaaaacatttttattaacaatatataattgtttaaaaacttatattttttattaaaaaaaaaaaaaaaaaacaggagaacaggcttgttaaagtaagtaatataatagtataaagtataaatctgtcaaaataaacaaaccgaacctcgaatgagatcatattagtgagaagcgacttacaatgcgccccctttggttcatgatctgttgtgaaacacaagacgttaaaccaagctttgttatattttaacatatggagacacgaattagaggaatgttttgggtcccattagacattagtgctttggaagcgttttgttacattttggggaagttccctccttgtcaagaaataattgtagtactacttctgacatccctgacacttgtcatagactcttaacttaaaccagctctttctgccctgcttcacatgcctctcacaaatgaaatcgtctttccccatcgccctcactttcacacttcggaaaaattttaacatgctctttttatttctttcctttaacctacatcacctatatatcttgaatagatatgaaacaggaaaaaaaaatgcgaaccagagaaattagaataatagaaataaaaagcaaacagagaaaatattaaaaataaaatgtactcttgaaacgaatggaaataagaacgaaagaaataaaataattctgtttactttttgtacaagtgaaaaggaaagtaaaaaaaaaaaacaattatatgaaaattattttaggaagtgatagtctctgtccaagttcttttttaacaaaccatgcatctagccatcgtaacttaatccattttgcctcgcccaaataacatgcaaaatcaaacacatctacattcgtaattttgtttgaatttcttgagaagttgaacacacaccatcacgtgacatacatatataccactttccgaaatcataagagttacacataatagtattaagttaagcagcttgtgataagtttataaggtttagtggtgtggtactggtctcaaatgagtgtgtgcataataattctaggagacacaagtaactagcgagactagtgaaataaaacatgggatacacgaaataattggggttcctagagttgaccaaatgagtgtgcaagataggccagtgctcctacaaggggtgagttaatgtatgtagctggctccgattgctcataatctgaccgttgatctgggaacctatcatgccgatctggtccaccaacaatggcccccacgagaatgtttgggttgggggattgcgaattcatcacactgaaccctgcggaacactggatctttcccgggtgtacagcaatcgacggtagagatgagcccctatggtgtatccttcgtgggtaccgtggaccataccccaccatgtatgacatcttcaatgggttgtctccaagcaagtaatccacctgaaaatacatttttatttttattttaaaaaaaaaatcaagttcaattaacaagaataggaaatcaagcaacacattttaatagattaaaatatattgaacccatttttttatgggacaaataataattattagtttgtaattttttattaacggaaaaagttggaatccgtcacccttttcttattattattattattattatttttttaatcatctaatcaatatctcccaaatatattgaacatataatacatgattcgattattactgcataaaaagtttattttttttcttcttctttctcgaacctgtttcttagctattgtccggagtctccttggggttacggtgattccgccacagttaacaagcatatgggattgggtcaagtatttggcatatgttagcagtaggaaggaggtggatgtgacatactgcatgttgctatcactcatcttgaaaagaaggccacctagtaacaagcaagtaaccgttacaaaattagaccgcaacacagagtttccactgggagaggggataagtaaaacttaaaagaaggaaaagggacttcacctggggtatattgggtggaagacaaagaggtcccagaaattagggaacagacgaaattgtccgcatgccccttgtagtcatggagggattgtaccctttgaaccaggaattcctaaaacatggaacacaaaaatgtaaatttcaaaccattatttgtttttactttttctagttttgcaatataaagcagaatacatgtgatggagttattttttggaccttggaaagaagtattcttgctccagcatgcttgttatcccacccaaaggtgttgtcaaactctgcagccccaaggatctggccattaactttgatgtagtttaggtacattggattcttggtagccttgtgcagccaggcagcaccccacaacagctcatcctaccatattattcaccaaagactttgagtaatgattatgtctcatctaactaaactgaacaagttgaaactttacctgatatccagagtaagagcagtagaaggggcacacataaggtttcaaggcattgctgtaggatcccctgtacttatcagcaaactggaaaacctacactcagaaacaaaatacactctttaagatttagttgggaccaatttgcaccaagtaaaagtaattaccaaaaaatgaacataaggcttaccctgatggctctcctgactaaaattttggagtatgtggggtcacttcttctaaaaaccagagaagcagctgcaagagctgcagcagtttctgcggcaacttctgaaccaggtgtgtttgcatctattttaaacacgcttcttggagtatccatgtcctctggtctctcccaacaagcatggtccttcttagcatcccccacctgcaaagccaaaaaccaaaccaaaccaatatcagaattcaagttccccattctctccctaaagaagactaaccccattttttttaaaaaatttccataagtacttataagaaaagaaaaaataaaaaggtaacatacatgaaagttaaatgaaagaactttcaaaagggtataactataagttgattttaggaagagtgttgtcttaactgacctgaacataaatggtgtttggatgtgcagtggctttgagaagataatcagtgccccagcgaatggcctctctggcattctgcaactcacctttcattaggccaccaaactcaataacgctccatgaaagcatggtggtggtgaatgccatgggaaaaccaaatttcacattgtccccagcatcatagtaccctccaaccaaatcaacctgcattgcacattcacacataaataagcaaaccaaaaaaacacaaatagcatggtaatgtgagagttggtaacttggtatatacatacatgcatggcagagccatcagagaggccagagtctctcctccaagacattctctggttaggagggagcttccctgacctctggccttcaaagaagagaatggatttggtgagagcgtctctgtagttatgagcggcaaagcgagggtggcgatggtgtatggggtgattgaaatgaacggggaaggcattgacatgaagcagaatgacagagagaagggaaagcagagtggtgaatgaaagggagaaagtcatttttgatttgaacagccaatgtgaaaccacactcactcactcaacgaccaaactgccacactgtgctgctctttgcttgtttaatctctgatttttataaagcaaaagctgcgtctctaacgtcctgcttcgttacaatacaacaattattaggtccacatcctgctcctgctacagtgttttcttatgcctttcatgcattctatttttcattttgtaataatagccagagtctacaaagatttcgggaaatggaagttaacttctttctttttttatccatgttattaatctgtcaaaagaaatacaatttaaaatctgaatcatttagttaacagatatatcttactttcacttatataaattatttaagaaatacaagttactcttacctatataaatttgaaagcaaaatttgaaagcaaaataatatatatatatatatatatatataatttcataaatattcttaacaggaaaagaatataaaagtaaggatactatgatatttttatggctaaattactctttcgttcattctttttattattaagagtttatttgatttcttaatttttaaaattgagtccaacttcactagtagccttattgtcaattggacgggaaaagataatattgattaaattttaaatattaatggatcaaataaaaaaaaatataaaaatacaaaattgagcaaattaaataaataaataagagagtaattttggctatttttattacacaattttagttttcttctccctcacactccaaaacggacggacaaataaaacactgactcacttgcctttttatacttctttgtcacctgctgtgatacgaaatgaaggaagcaaatgattttgcatttcgttccttgcatatgctttcattttcttgagtttctcgtgttccagacgaaaggtaaggaaaatgttaacaacatgttatttattattaattacaatttattattcctttcgttccggtctttcatattatattataagttatttaatattttgacccaatatactgattaatttattgaatttcatacaaaaaattaggtaaatatttaatgtagcattcatattataaaataacatctattctgatttttttttgttaaattggtgtgtaggttttcatattatcacaaaatttttaattaggttgttatattttttatttttttaattaacttcttatattaatttttaatttgtaatcagatctttgtgttaatctatcgtaagcaatttatcagatttgacaaaatattttatcataaatatacatgtagatgtcaaatattattccatgttaacccaaatgatattacaattacacatagaattattattatttttatttttttatctaacacgtctcaacacttcatgtttttttatttccaacgcatccattatctcccaaatggttacccaatcctaaatatatggatttcatatctcaaagacggtaacttcaaccttaatacgtgattaatctttaatttatatgtaatattgttcgcacttcctacctttgtatttagaatttgcagctttgtaatcagcttaggtgtattaatttagcattcacatctacctatgtatataattaaatattctacgaatctaacaaattttacaggaccaattaacatataaacccgattacaaatttaaaattaacatagaacccaattttcaaaaataaaatataggatctaattaaaaattcaataataatataaggatctaattaaagtgtcatataatctaaaagggaagagggaaaaaatataaaagttcacgagtcttatttcacaggatttaataaatttcgcattttttaatttttacttaattatgttaaaattaagttgataacaagaatctatcaaattgaattctaaaaagctactaataccgctggcaacatctcgtcacttcgaaaaattatgtgtaattaaaattaataacttaacaagtaatatttttaataaaaaatactcgacaaattgtaacgtgattgaatttttgtataagagggggacatattgggtaaccttcttgaagtgtgagttcggattgaattttaaacagataagatttgatttgaatttctaaatatgatttagtttatattaatgtgattcattttttagattttataatttactactatttacttaatattatttaaaattttactattatttgaaaacttctagtgacattgcactacattggctaagtgtaaaggcggagaaattttggacacattatgttccgcgtttggcttagaaaattgtttattttaatctgtttgtctaaataatcacaaatcttctcttcataatacaggaactttttaactattaagtaaaataaaaatattaaatctatattttcattcattgttttataaatatatattttagaaaaatatcaggaagaggaaatagcattattccgctttggttttaaagttgatattaattcttttggcgtgtcttgttgcataatgtagttgaactgagagctccaagatcgttgataattgctgagagaagttgttgcccataactcaaaacacatagtattcagtgaaaagaataaatgtgtgttctatcgatgcttgaaactcggaagataggcaagggaaaggccaagagcacaagcatggagaagacaccaaccttcaaattcgctgattagttatgtaaaattgtgattgtgatggaggatttttgagaaaaatatataaaaattaagaaaagacacagagaatgacataaatttttcatttcaagtaaatatcttttaaatttaattttttacaacaaaaaaaatttataattttttgtaaaaaaaatatttttttatttatttttagtaaacattatataatttctttaattcaaaaacaaaaattttacccttcacctttccaagatcacaccatcttaaacttttccgaaattaacggtccatgatgaaagcccatacacggtcattgaacttcttcaatggataagctaaaggaacctcagcatttggttcggttcccacttacataccaaccaaaccctacatgttcatcccataattggggggatattaaattacattatgcgttccaagcgcacttctcgttctttggttattttcaataaaatgaaattgtcgtagttgaatgttataaagaattagttgaagtgaatatatggtaagtcacaatttggctatttttggtatattttgtaattctatcacaagtgaacacacgaagtgtaaaattagtttgtgaaactatcataaaattctatccacttcaatgtagatgtagggaatgtatttgtatattcttgagtgactgatattttattttgtaattctgacaaattaaatggtatctcatatcagagacattccaagtttttaacgaggcagaggaaaacgtcgtcggataaacattattaaaacaaaagtttactatacagaatagataataactaatataatattgttaaaaatgttttggccgaaaaaagggtgtattatcagcatgtgaagaagaataactttccactatgattctctcataaaatgattgaatttgtgctgcatgtgtatcgcatatgccatacagcattatttggttggaccaatgtatgtattttccttaaattactgctttattacttaagagggttttgagaaaggaaagggatataaagctgcacgttatagcagtagatggaccaatagtctagactggaagatgaaggagctgcacaagaggccaagagcaaatggttcttaggaagtgcacgctatgaagtttgatcaaagagagaagaaacaataaaacagaaacaaaatggtcattattcccttttagcagttttatacagaacatttaagatcatatttattttttttgtttttcttgggacttagcccctcccggaataaatttaaaaactatacggaaacattataagccgcaataataattttatgtattatttaactagtaattaaaaccattcaagtaaaactataaaagtattgtcgtagtaattataacattttttaattcaaaatcaagcttaagattttattacattcaattcaaccgcctatataacaaatcatcacatgtatgatgattccaaattcaattcgtgcaaggcaatcaattcatgaaactaaaagaaagaataagaatgaaggatgtatgaagttgtaaaggcgagaaaattagctgggagaagtgaactttttttctttttccgttttgccctctatcgtttgttgttgttatgttaaaaataaaatcaattaggtaaccctttggtcagaaagcgattgcacggatttgacataatgacacatcgccatgtgcttctgttgtcctcccacatgcaacagtacgcatttcatgcctattttcttcgtatcccctctgcagcaaaaaattatagacacatgtaagttgtatttgatcagggctcaataaaaagactgacacacttttctctcattggtgtagaactgggaagatagaaccacccaatagtccaatttcgtgacctggatatggaatattgtggatagcatagtatgaatactgatgtatgttgactgtgagcctctaatttctcctatttatatttggctatagctaggttcgttgttttagaactatagaaaaaacccatgcacggttttaaccatgcaacgctagaatgattattagcattgcaaatggaaatttgtacactaagaatattgtttaggagtaaattggtttcatattctataatccctcttttcagaattggagggtgccactatcattttaatttttgagatcttatataatggttgatatgattaaatcaaagtatataaataagtaggagataatctcattttataagtatatttttaagattgagttagatttatagttaaattttaaaatgatattaaaatttattcttataattattgttgggttcaaactttatgatcaagatgttcaatcttctaaatgaggagaatgtattaattattaaagatctcattaataatataaataaattactgtatataagtaaaagataactttacttaaaagttggatttatagtattaaagttaattctaaactcaaattttaagttagcgaacactagagagatgcttctaattttagcatacttgataaacttctcctcaaagtttcacaatgacacaaattttgtctttcaatttctttttcacaaatttgcctccaaatttataaaatattgcgaattttgctttcaagtaaaagcaattggccacaattaagacatttagtgatagtttttcttttaaacaactgcaattaaaacattttctcttttaaacaattatagttaattaagatattttgtggtgattttttcattaattgtatcactttttctacatgggaaaagaattgtgatgttttataaattgggggaaaattcgtgaattatttttagggcaaaattgacgacattatgaaactttggttgcaaaaaatgtagttaagccaattattttttaaaaatgatctctggactagttttcaaaacagtagacaaaagagtttacaaaaagaacttttgaaaacagaaatcaaacattttaatttttatcatacgcacgctataattatatattttacattttatttcgtttaataataaataagtctttataaaaacagacaacacaaaaataatctagaatattgttataaattttgtttccaagtatgattttttatttaaatatctttaacttttgaaataatttaatatccattgtaaacatttaaacacatacttaagttttattaaattgatttttcggtaaacaatactaatagctagcaccaattgtcattgacatttgtatcataaaaggaaaaaaagaagataatgtacgcaaaaattttgattttcggtatatgtttactcaaacttaataataaaataaaaatgcatcaaacatatctcttttgtgttttgagttagatggatcaaagagcataaatgatcatgtaccgaaaaaacaaggaagagaacttggaaggatcaaagacttcgcagtttcttatggttcaaactatagatatagggttattcacagacacaaacaaaaaaactattgataaagggattacccactttaatgatatttgtatgggttaattaagttttttattctcaaattatgggagttaaagttttggtctctaaactattttttttttaaattgatctataaagaatttgtcgttattaaaaatagtttatgtcgttaatgtcctttgttaagtgttgagttgtccatttaaatggttacgaatatcaccatagattacggatgagaaagataaattattgcttgaagcgttagggttcaacgatgactcttctccttctcctttgcattttaatcacataatattctaattatttacctaaatataataaaacttaaatgatatgtatatgacatacacttgacatttaatgtgtcttattcataacacttcattgtttaacaaatgacatgaacgacatggactatttttaataacaacaaattctttaggaaccaattttttttaaaaatagtttagggaccaaaaattcaaaaactcagtttaaggattaaaaacttaattaattgtaattctattttgaaagaaactaatcatgctaacttagggatatctttggtcctaaaaaaattatagataatgagaacggacctacaaccaaataacacatcggtggcaaagaagttaaggaacaaaacaagtgaaaatatgcaaaataacaaggcaaaattataaatttggtcctcctagttgtcttagaatttgattttggtttccctatactttaattcatgaatttagtctctcagttttttgcaatctcgttattttagtatccaacctcgaaattgaacattgacggttaattgcttgtcttgactgtcatatatcatgtctttattggacgttgaccgccacgtgtcttgcttttattaaacattaatttcatgctcataattaacgtcaaccttcaataaaagcacgacacgtagtagtcaatgtccaataaaagtgtgacatgtgactatcaagacaaacaattaatagtcagcatttaatttcggggttgaagactgaaataatgagattgtaaaaaactaaaagactaaattcttaaattaaattatagaagtaccaaatatacaattttgttaaataacaacttgtccatccttctttattttatccatgaagacggtcttttttcccctcggaggctcggctcaaagttatgatgttttataggcactgacgcccatgggcctaaaaacaagaggaatatagactggcccattccatacattgctagtaacggggcacatctgcttggtagtatgatatgtatgaaggaattgtttacccagtttggttggagatgatcatttgaagttagcttcgttatttcatgagctacggggtgatcaatgacgttctaataccttgtccttttgaagatgccacgttgtcacgtttccattacttcaggcctagaagagggtttagctagttaacaaattgggtggaggttgggccaacccaaaaccaaatgaaatgaggctccattcagcaggccatccctgtcattaggtgaatgaggcctcaataaagttttcataattttttttaaaattgtttattgcttatttaaaattttcaagttatagttgtgatgaataattatagattctttttgtgtattcttatgtcacgttaaaataaatttagtattaatattatcatcatcatcaaacttttaattttataatttaaactaataaaggtggacagatttgagataatttaaatctcgtcgatatgaagatcttgttggtaatactattgaactcctcaaatctaattcactacattgtttaataaaaaaaaaatataaactaatgaattattaaaataaatttctaataaattatttttaattatttaggaaaaatatttcttaaatcgttttcgtttcaaattaatttctataaagtaatctcatttttaaaagactttcgtaggaagttagaaaaataaaaatattgaattaataattttattacttttaatgacaagtacacatatataatatgctagatatattatctataatatattacaaattaataaaaaaatattttgtttttaataattttatatttttcaaatattattttatatttacttaaatttgtgccatgcttgaatattatatttaattctttatgtatgagattaacaaggtcatgcagttaaacaatttttacaagcaagatctctctttatcattttattgtggctttttaaaaaaaacaaaatcattgtattttgtgaattaataaaataaaataaaaaagcttcatgcatcctaattactagtattaattttaatttatatatactttaccattcgttcttagtaagtgttttaactattatttaataaatgaatctcatatcccataagttacatgcaacaacatatttatactactaaggaaatatgtaactattagattatgatttttcttttaagaaaaataatgagatttaatttccgagtgcatttcaatgatgcatttttctaaaaagaaatttagtgcataatggggatatctctggtggggttagttgcttttattatatagagcactaacataatccctcacaagagtacgtaatttttgggtatagtgatcacgtgactgccataaatataatagccctatactataggaactctaatgaagtagtaatacacacgtaaccttacaaatcacgtgatctcctaggttcagttatcgctgaaaactgagaattcgaaccacgctctatctaaaaatatttctcaactcaaaccaaaccagagaagaatggaatgccagtactgttcaaccaatcattgccttgaataaactgcccaactgtgaattgggttgcctcagtggagctgttaattaccctataacctggccacgttaccctaccatttgtgtttgcacctggacctctattcatgtactccccataatacaacgtatccaatgcaaatgtttcattccattccaaccaccctgctgggtcaatcagatcctccacgaaagattttaggacaacagtcctagagtacattttccaaggacgtcctaggtagctcttgaaggaggatttcacagggatcaaatctgctgcagctgcaatcttgcagttcaagatggatatgccagtgttttggttagggtcctctctgccttgtgcggtgaacaagttcttctggttttcgtttggcttgcgtgcgtataagttgcagttttggaataccacagctgcattgccgaaaatgaagtctacagtaccgtaaatgtcgcattcacggtagaattggcgtagggaatgcacgtagagagtgtcttggtagccaacgaaactgcattggtagaaagctgagaagtcagcaccacttctaagtgccacagcttggtgtttgtcaggccctgctgagttctcaaatgttataccctttgctatgaatcctgctcctactacagctgcaacataccataattgtcatagctgttatattagattttggatcattgttcataattgaacaataaaaggcaactttgttctatcattgaaaagaagaaagaaaactataagtctgttaactttgttctacacattatttgtcacatgaattacaaagatcataaaattcacctttcttttatccacgtgcatccaaaagaaaaactagaagcattttttatttgttaaagcaaaagcagtaaagcaaaaggaaaagcatagaagaaataacaagcaaagtggacccaatggcactgaaaagtagttgggttgtgatgagaattatgcagatccagaatagaattctctttaggtgggcgtggatagacatgtggaccctttactttgacccagcacagaggtaattctacttttcgcgaaaatacaaataaaaaatgaacctaaggccaaagatagtcctgctcctgcctacatgtattgttcttttgtcttataaaagttttactctctacatacttatacatgacttttatcgcttttctatccattgtttttttccttctcattactctacaccagttatgtatttcaattttttctgttctttttctatctttcaccaagattacccacgtcattttctttccaaaaaatggtgtcgccactcatatctcggaaaaatattataaaaggaaacatgctttcggccaggagatcccaaatctaggtttattgctgctaacttaacaaaaaaaaaaaaagaaatttgatttatttacaatatatatttgctaatatagttgtgatttagatacgttgtctgatggagaagtccaattgatattattggattgcaatataactggaaaaactacacagaacaccgaaaaacacaatttattcccggaataggaataatagaccggcaatgatcaccaagaaaaacaagcattttacattttagaatcttgctagtcagcattgtaaccaatcatactatcaccactttgacactatttatatttgatgtatacatgattgataactggggtggtagtttaaacttgcaacatgcctttgaaaataattttaaaactaattgagagggggaacaggagtcatgtttataatacagttgcagaaaagagatataatgggaactgatgtattaaaaaaaagttttataagattaaatgaaaatcatttaaattattttaagataaaactcaatatacgtactattatatgctcataagtaaagcaaaagccagtataaatacacaaatcgattggcctgacccacactcagaatctctgagtatgttactcttgagtgagaataaaacaatcatcttattctacataatatatttatttgtgcgtgctcttgttatatatataaaagtaactgccttatgttattttaattgtgtttcctaattataaactttttgttttggttgttttgcctctttcctttcaaattttcaatcgctacagtagtatgtacatccttgcttgtgaatattgtgattgggaggggccgtgaaactgtaaattgaccttccgatataaattaaacatatatacatgggccctcacctatcattttttcagcattatgttcaatcacgggaagcagaatcctcgaagattttaaaatggcaaagccttttgtcttttgaactttccttggttctattcaaacattcaaaaaccaagttgtgctctagtgtctcacaagataagaggtaacattttactagtgtacacataaataaataaataaaaagcattttaattacttgtggccatgagcccatgacatgaatctatcataagttgtcgtaatattcatagccatttgttaaataaccgacactgtcctgtgtgatatctgaattttaaggacaacagagcgcatcagaaaatgcatcaacctctacaacgctatttttcaatgcagtgcacgatgccctgacaaacccaagtagtagtccgtggtctgtccaaaccatttaaaaatgattttcccacatctacattatgtattttaactacaaaatcacctgccaaaattaatttagtaataatttttaaaccagcatgtgggctcatcatcaagttgccattttccttgtcttgttctaactttttcttatgcttttttctgtctttgacatactatatatcaaccacatcggccacctcaaagtaaaagaatttatcaaactttattaaggatgtgtttgtttaaaattatttgttgaaataagtgtttattttaataatatattaattttatatttttttaatatatttgtctaaattatttttacttaaaaatgataattttttgtttattttaaaaaataaatcttaattatttattttaaaaaaatagtttaaacaaattgatactaattttcgagactatagatcaaatctcacttatgaacatatactatatatattatacctatttttcattttcaaagttggaatgtcatagcaaacaaaaaattaacaaattaaaaataatatcagagaaggtaggaagaagggaagacataccaacagtagcagattgaaaagtggtccacccatccacaacattcctactgcctttcactactgtctttccaatcccgtctccaacaaacatcagattcgtcttcttccttatcacttccacattctcgaagtatgccccctcttttatgtgtatcacaaacctgcagttatatcaatcacacacatctaagtttacatatatatatatatgtaaatcaaagtaggactgtaggagcttgaaaacaataaatctaagtgatataagtataaatagataatcaccttaaaaaaaagtatgcatagataatcagatttaaaattacacgattacttaaaaagtgtaatgtgatttttaaaaagagttatatgttactcgttttaatttaactgttaatatttattcatccgattcttacataaaaaaatctcactgtatagtgtatacatttcccaatcaaatacaaggcattaataaaaaaatcttttaaaaaaaatttcactctctaccaacacctctctctttttctctttgtatcccatttgttaattactatattattcatttatacatactagtgtaaattataatccatcacattggtgtgaaaaaatcttttttgttacgtacctggttgtgctggagttgggagccacagcgagtgcttcccctatagtggtgaagttgccagtgccatctttcgctacaagaagatcgaacttggtctctttcactttagcttgaagaagctttcggtctttggaggacacccacgaggggaaaccctttttcatgtttccatattcggggaaaaccacagattccgaagttgttaatttcttcactccaggcactttgttcagcatggccaacgagttgctcacgtggtgcgatatctcaagcagcttcttctcgattctgtccctcacgcgtcctttgctgtaagcaaatccatcgaggcacgtgtacaagttggtcattgctccgcttaacatagtctgcaggtcatggtgccgcttcgaccctatggtgctcttggagagatcgtcgatggtggctttgagctcaacgttggtgtcttcgaacagtttgagacagtcgtcgagggctctctggtcgagtgggttgaggtttttgagcatctttttgaggccgctgcaattgtaggacgatgatcttacctcgtacatggtgtggttcaccactgaggatatcacttgtgggacagattttgtggcgagatctgggaatgtggcaagtgttgagacacataggtctgggtagagtgttccttggcatgtggatttggctactacttgtatgtgcttttggaaatggtggaggtgtttttgatctggggctcttgttattgttattggggtgttagtgaaatgagttgttcccaagaagagtagtagcgcagaaatcacggtcagaatggatgcaagtgtgaggttgttcatgatgtgataagaggtggattagaattactgtgtaagtgtgattgtgcagctagctagaagggtacgtgctgtggataaatagagtggttggattgtaacatggagtggggtgtttcacgttgagagtgtgaaactagatagatttatatttttaaattttttgagaaaaaatgagctagcttttgtcataatgtgacatggacctcatgctgactaggttaaatatgccacctcgattaattgaactctcgagtatgcaacgtgttattatgcgtgagatccttaatcattttggctcctgcatcaagtactggagcttgaagtcccttttcctctctcttatttcacatctgcttttcttgtaggaacaagcttcaaatatattgcttcaggccaattcttgtctattggtctccaattctgaatggctggaattaaagggtaacgccttttgcagtatatttctgttcttttgaaagggctagttttatagaaagacatacaaaattaacttgaaatgtgcaattgatgagtagaatcaagtaatgtaaaattctcaatatatcttaatttcctcaatacaacacatacatgtttttctacttgtgagttgggagtataataaaattaaaccagtatgtttaaaacttgtggaggagcaatagagttgtcgggatgtattgatgattactgtgaggtgaacaactttttctgtgcatgcgattgtaccaattgcgtgcataatcgtggtcagtccccatggaccggtggcacatgcagatgaacttcatagacttcttctcaatttgtggaccaacatttctgttagttttatggtccatacctttggcccaataaccaattttgtcattagcattcgggggcgtgatcaacgtcaacgttcgtgtctagatattacttggacatatatttgtcaaagagcaaccactttgtgtcgttaattataagctttcattttatatgtcccacagataataaagcatgtaccaaaacaaatcttaatagcaatttaaacgaataaatataatcccaagaaatacttacatacatgcacgtttgcacgtttatagtaaactttatatgttcctcctaagttgaccacagctgactacatatttggtaattcttttgttgctctacaaaactgtaacatttattctcgtctccccctcggtggacaattcaacacgatcacagcttagggtcaatctaacgcaaatcaaaacacaggaatttccatacataatgtaattattaaagccgctaatgatttgactccaaatgttggcattgtgaaagcctaccttgggagaccatggaagcaatattcaaggacaattatcatgcaatcctttatatataataaaccccgttggttggcatgaatggagtgctgattttgcattgagtaccttgtactatgcagaatataataacacgggacctggttcagacactacaaaccgagtgacatggccagaatatctcgttatcaataatgccatagatgcaaccaatttcactgtgtcaaacttcttgggcatggatagggtggattgatatagttcaactcaaacagagtaaagttgttcaattactgtggttttggcacgcttgtttctacatttacctcaaactggtgtcccatactcgggtggattgatatagttcaactcaaacagagtaaagttgttcaattactgtggttttggcacgcttgtttctacatttagtatgtatgtcgtacgaatgaataagattgcttttaggtgttgcctaggcaatcctaatggttatcaaggaattaaaatatgtatactaatagtaattttgcaattattgaatttatataaatttaaaaatatgtatactaatagtaatttgattaattctacacctaaattttcatggtgtcatgagtatgtggatgaattaaaatacgaatgttgtaactttatcaatatgtttaaatttgagttctaagtttacaaatatattaaatacttaaagaaaaaaaattgcctacaactcccctttatatacttatgaatttatttaaaataattatatacttgcaaaatatctttccaattcatcatatccggaatgtaatatggtttcaaatgacgaactggacaatttcaataaaatttctttcttaatcaaaaatcggaaaattgttaagaaatctcttgatttttaagtttacttgtttgaatattgataatacctgaaaaaacaagtagaaatgttatgtgaaacaagaagatgagtgttttataaggtagatttggttgttaacgaggtgttcttgatgattgagggggagagaatgttgataacacctaaataaataagcagaaattacttgcagataagtcagctaaattttaaaaatttttaaatttgtagatgattttgttggaattacttttgttgttttatgtaaataaaaagaaattagaactaatagatgaatttgtagtagaaatctagaaaaaaatatttaaaacccacctatagatttaaataaagaaaattcatcaaaaaaaatgtaaaagcttctagcaaaattccctgtgaatttaaatctacatgaaaaaaaaaatcatatcggtacgcataacaaatttagcagaaaaaacttgcaaaaaaattcccaagaaaatcgcaatagattcttaaatttatagtaatgacaacaatattaaaaggtacaaatttctactaatttaatgctcattatttatatatttacaatactacaccctcccaaattttagaccaagttctaggcaattaatggacatcgaactcacattggacctagaatcacataggagcaaaggactattaagctagaatttagaaattgctattctcagccttattttactcttcccatccctagatttctaaaaaaggtaggaaaagacctcactgccctttagccatttccttagacccccttctccttctctcatcacctttttcctttccctaattacatttgcgccgcttcccatccgtgtttttcctttttcattcttccgcctccacacttttttttttttagattcaatggaattgtaattatgttatgtattcagttgcgaatgtatattttctttcgctgaatcattgtgtgtgtatattcatacacaatgaaatcataattatgttatgtatttaatctcaaatacacaataaaattatgaatttggattttgatacacaatttacctaatttcaatgttaaaccaagatatacgttatgagtcatgcaacgagttaggcatcattgactataagtgcataattccaaatgccttgttaccaaaagataggcaagtctttaccaaacgctttctttccgttctgactgccttccgtctttttccattttatgcttgaatcctatgatgtttaaaattgtttaaatggtcgatgcctcttattcaaaaaattgtttaattgaactttttaatgtgattaatcacaacgagttccattaaacatattataatgagttttatgttcaaacttatggtattaatattcattcaataagaatttataggataaagttttaattaagttgtttgatcatacgtaatgatatgtttggataaaaaaaagaaaatagaaaggaaaaaattatagatgatgataaatttttatttaattgaaacaatatgaaaatacaattattactgagaaaaaaaaattttagaaacaatttttatttttcttttatttcaaattttaaactttttttggaactttgctttctctcctccacggtaaatattgttggaaaggaaaatacagtgacgtcaatttccgaggattaatttataaagtgtgcgttccatcgaatcatcaattgaccttgtgacataaaagtcaacatttttgtacaacatgttagactccatctgtatttggcaaaaactattaaactaattggatacgtgtgagattaattaggttgaagacaactccgtttgacaaaagaaaagaaaaagttttttgaccaggatgtatatattctgtaaaagaatagagataatggaagcaatataatataatgaaatagtatcttaaaaaagagtggaaatggaaacaatacatagaaatagtatatgacacgttcataattgtgcaaatgtacttgccaaacataatccttttctcattacaatttgcaaagactggtccatggttagcattgcatagttgcacttaatttagcagccactaagccaacaatatacggaatatttatgaattaaaaaaacctctggatttccactataaattgcaagtgatgcaacacaatttccatcagagtgataaatcataaaagttccaatgggcaagaagaagttaacctttctcatcctcctattagcctctcaagccttggctgaaatcactcccaacacttctgtttctccaggaacaatatgcaagtccaccccagacccatcttattgcaactccgtgctccctccccaaaacggcaacgtttacgactatggccggttctcggtcagaaagtctctttcaaaagccaccaatttcttgaacttagttaacagataccaccgttcctatctttcaacctccgcaatccacgccctggaagattgccaaaccctcgccgaactcaacatagattttctctccagttccttcgaaacgctgaacagaacaacgaggcttttacccacttcacaagctgacgacattcaaacccttttaagtgccattctaaccaaccaacaaacctgcttggaaggccttcaagccaccgcctccgcatggcgcgtcaggaacggactctccgttccgctctccaacgacaccaagctctacagcgtctctctggcactcttcacaaaggggtgggtccccagcgacgctaatgtctccgtgtttcagccaaacgccaagcagcgtggctttcgaaacgggcgtttgccgctcgagatgtccagcagaacgcgcgcgatctacgagtcggtgagtaagagaaagctccttcaggcggcgacggtgggcgacgtggttaaggtaaaagacattgtgacggtgagtaaagatggaagcggaaacttcaccaccatcggcgacgccctcgccgcggccccgaacaagactgcatccacggcggggtacttcctgatctacgtcaccgccggtgtttacgaggaaaatgtgtctattgataagaaaaagacgtatttgatgatggttggagatggcatcaacaagacaattattactgggaatcgcagtgttgttgatggctggacaacttttaagtcagcgacatttggtacgtactactgcatgatcaccataaaaagtggtctattattagtagaactactatagtattccatctccactcatatatcatattaagaatttttttaatctttgagtaaaaaacaattattgaaatgaatattttaagtttaacatataaattactttttttttatttatatatgaattcacatagaatacatctcattgcaaaataattatacaaaagaaattaaaaagaactatattattcatgcattatttttaataataagatttaaataaatattcttttttgaaaatgatcatattgtctctactgactgctaatattattaatataaaattacttttccactttttagcttaaaaattaaattaaattaaagagaatattgtcaattttcatccgtgtcttgagattgaaaataaatataaaaattgtttgaaaaaaacgttactgttgttgtcactttcttcccattacttttttccaaaataaagattggaaataaaaaaaataaatgtagaaacttacagtttacgaaaaaaaaaattatgatcaacaatcttttagttgaaaaaagcatgatgattagccattatgaatatatgacttaatagaatgatgtaatcatattatgcacgttgcagcggtggttggcgcagggttcgtgggtgtaaatatgaccatccgcaacactgccggagcagagaagcaccaggcggtagcactccgaaacggcgcagatttgtccacgttttacagctgcagcttcgaaggataccaagacacactgtacacccattccctgcgacaattctacagggaatgcgacatctacggcaccgtagatttcatattcggaaacgccgcggcagtgttccaaaactgtaacatctatcctcgccttccaatgagtggccaattcaacgccatcaccgcacagggacgaaccgacccaaatcaaaacacgggcacttccatccacaactgcacgatccgaccagccgatgatttggctacgaacatcgatgccgctgaaacttatctcggaaggccctggaaaaattactcccggacggttttcatgcagagctttatggacattgtcatcaattctgctgggtggcgcgaatgggacggtgattttgcttttagcactttgtattatgcggagtttaacaacactggacctggttctagcactgtcaacagagtcacgtggccgggttaccacgtcattaatgccactgatgctgctaattttacggtctctaacttcttgcttggtgataactggctgccccagaccggagtggcttacgccagtaacttgatatagatgcattaactcactcattcatcactttgttcttattttaagttgtaatttcctctttgatattatttttttcttgttggtaaaaataaaatatgcaggcgatcagtgaaattgtaccgtacccaattcctgccatagtgcaatgtgaaacctaaattgtttgaatttaatttaatagtattattatgcatagcaaaaattatatattttaaatattgtgcaaggttgatgtacaaaataaacccgaacgacttccttataagattttcttttttacagcttctgaaaaaaaaaaaaaaaggaaaactctgctctaacactctcgatgtgcattattctaacacaacatattcgtgcttgcatgattcaatccaaacacccaattcaacacaacgctagttattctctctcacctaactaaaaaactcaaaaccaccttgtagatcaaatccccgggacttgcgtaattgtgaagaaagaaagaaaaaaaaaatatagcatcataacgagagagaggagcaaacatgttagaatttaggtacgagcggccaacatggccttgttgatggcgacggcaatgttgcacaattggcgaaacgacacactctttctagacagaacatcatcgtccccggggatagaatcgtcacatgtatcaatcgcagccaatgcagccttgagccatacctgagcatcaagcttgtcattgttcaatatggacgcaacagcatcctgaatttggccctctgcgtccaacagattctctttgcaatcagccaacccctgttgaatcttaggttccaaatcttggttgtcgatcattctcttacaatcatttagtatgccgctcgcgtttgatgccgccgccttcagcgatatcaatgccagctcctgtaggtccgcatgatcactatctgggtccgaggaaagcacctgcatgcacaattcatcgtttcccctgtttttgcatatgctctttattagctccttgcctattttttcttccgccgcaccgtgcgctataatcaagcacatgcatatggccaagaccggcaagtagtttgttttgctttccattttgttttgctttggttttctgattaacgttgaaaatgttttgtgtttataaactggcgtggggaacaagaatgggagacagagatgcgctaggcctcaactttggatggttctgtgttcgtgtaacgcttattgctactgctataatcagaatgttaatttagggatgcataatgaacactcaattatgttttgaattttgatcccttgtggtttttctatttttgggtagactaccacactttctacggtgctaacttcttctttctgggcccatatattaacgggctttggagtttggagtttagataaacttgggtccatttaatactctagcattgacaaacattttttataaaaaaaaaaagaagaaaaaaactttgaaaacatccgtacctcaatttttgaaaaaggtaatagtaacactactccatgtaacaaacaaattccgtacacacgggaaaatttatgacacaagaacaagatgtcgttttgaagacaaaattcatttcgttttctagatcctgtgcatcagtgacgatatcgctatcgcactcgggtagtggcatccattcatggagcccgcatgacccatattcgaattgaaaaatgaatgatcattcatacaagtgcaacaatcttatttctaaactaaaatttatatatatacaatttgacacacacacacaaaaaaaatcataatcatattatttcttcctttcttatagtgaaaaagaagagtggatacgtgacatgttgagccaaggctaaacaagaaaacgccacatttgtcagcgacactaggcgccacttaaaaaaccaaccgctaaaggcttcaaaaaatctcttatatgaaggaatccaataattcaacgctctcaattcccaacccgtgatatcgtggatccatgacccggctccgaaaccgggttttgttctaactccgctgtcatgcctacgagctccaacgactttctcgggcaccaaaccggtgcaggataagaagataaacccaccgaacccggttcagtatcagaggacggttggactggcgcggcgtatcggcgaaccggggttcggcaaagtggacagttagagtgagagtggaaccaaatgtcaacgcaatgggcgtggaaagcgtggttacagttcggaaggaagcggccttcttcgccgtcggcgaactccgacaagcagacggcgcaatcgtggatggagaggtgggtgtcggaggaatacgtaaaggtgggaaggaatttgagaacggaagggcaaaggccctcgttaaaagccacggaggaaacggttcgaatggcgtggcggtggcggcggtggcggcggaagcatgagtcgcggaaggtgtgaacgaaaactacgatgattactattaggaagagaaggatggtggagccaaacatgaccttgccattactggcatacttttcttgagtttctgggtccatgatgaaaatgcgagagagaggaaagaaatcagaaaagaagagagtttgtagtggacaagttttaagtgttattgataaaacagtggatgagatggtagagagagactgagaaagtgaaattttaggaataaataaaagtaaaacgtttttttgagtagtgtgcatagcatgggagggaaatgaagaggaaggttcctatccagttatgctgttactgtgacggatgaaatttcaacttagcattactatttactaccattatgcatttatttcttttctcttggctgctttacgtttatctttatttaggatcaaaatccaactttgctgtatacgtgtttgaactattcatatctcgcaactctttaccttgtaaaagaaatggcataatgactattttgcctttcacattttctttcataatttccctttaatttgcaatatttatctgccacacgcaattgctttttctggatttggatttcctactattttatccaactgttgatttttaaaaagtatttttgaaattaaattcatcaatataatttatgaactgtcaaatctttatcataaatttttatggcgtccaactacgtgaatgtgtctttttttccaccgtaggaaatccaaatccctttttttgacagctaaaatgccagtttatttattatattgtgaatataaattatatacgaatactagtacttacaaaagtgtagtttacttcttttataggaaagaaagttatatatggtatttcattcataatccaagatgggatacaaacagggatattgtcagattaagacatgactataggcataaaatgatgttctagttagagagtagacaacattgacttgtctccttacatattcacctttggaaagatgaaaaaatttgctctacatttagttaatataacatggagatcagagagaccaattgtgtgttgttgcagctatcaatcattaattgtcttgcaatcatattcaaaaagaacttgctggtaaccaagttcatttgaaagagagctcatgctttcgcttctgatggtgaaggaactccattgagaagattggtttgcttaatctaccaactggaccacgaatgcaaatgcctgcaccgaaaaactatgtttctgtgaaaattgatgcgtcaagattgcacttgaccatgccatttggtgttggaagccaacgatcatgtttattgtgcgagatagcttcatgatgaccgaccttcagcaacctggtagagccgttcataatatttctgatttgagagagcaataaagatatgaggagcaatatgtaataattcatggtcataacattttgaaattttgtaacgctcatcagttttgaaagccattttgaatggttgttaatggatgataatggccaataaagaattgtaacagccaataatgagtggtaatggctgataaatgcattcttgatggtagaatgcctatataagcacatgaatttggtccctgagctcatcccttcgaattcagtcttatacaccatctagagagtggaagagagagagcttggaagaaccaaaacaagaaactcttcatagcaatggctggaggtatgttttgatctgtaatttccgcattttattaataacctgtgtttctttgtagtttgtaatatcacaggttaaaagagatttgttctaacatttggtatcagagcaagaattgcctctgccttgtccattttcgtttttcggtattttccgatttgattttgtttatggtatgaagggccttgtttcttaaaaaataaaattagaaatatgtatttcgtttgatttccttaattttggcttttgaatcgtgaaaaatggtgtccgaatgaatgaaaaacgaacgggtctgcgtatgggtcgggtttgacccgctaaaggttgaagatgatgaacagtgttttaaaaaaaaaaaaaaaaaaaaaaaaaagacaaaaactcctacgttttgtgctagctaggtatcgaacccttgacttcaagaacactaatgtatgtgcagaccactaaaccaataaggcttttctgatacgttgtcgtttttaatacgttatatacacattgtgctttacagttttttgaattttgatttaatttatgcatgaatatattctagaacattttattctatgcatatatatatgaaatcaaatgcataatattatatttcaattataaaattatatgagaatcttattcataattatattgtatcttgattttgaaatgcaaaatactatttattctcatataataaatttttatgtctaagtgatctttatgattttgattaattatggattagccacagcatctatatttgattaaaattatatattaagttggttaaagatcatataaggaattagacataatattgtaattaattatacttatataatgaattttatctcacaagaatttttattatatctgtataattaattgggataaaatgacgtattatttttcatgatttacccacaggcatcatgatgtatggataatttgtcgattttatcataaagtaaaaatttacgatagaaattaaattattttcatattgtacccgtaaagcatgaatattaagcaaataatttgattattctatcataaggtttaattgtttcttattgaattaaaaatttagcccacaggcaatttttatgtcacaagattcaattttatggtatgtttacattggtaaaagatacaattaagattagtatgcctcaaattttgacataagcctttgaattttgcagcttctcaaactattaatttttctgatattcaatgtgatgttcccgaactcaaaggagataactataagatctggcaaggagagattctttacnnnnnnnnnnnnnnnnnnnnnnnnnnnnnnnnnnnnnnnnnnnnnnnnnnnnnnnnnnnnnnnnnnnnnnnnnnnnnnnnnnnnnnnnnnnnnnnnnnnnnnnnnnnnnnnnnnnnnnnnnnnnnnnnnnnnnnnnnnnnnnnnnnnnnnnnnnnnnnnnnnnnnnnnnnnnnnnnnnnnnnnnnnnnnnnnnnnnnnnnnnnnnnnnnnnnnnnnnnnnnnnnnnnnnnnnnnnnnnnnnnnnnnnnnnnnnnnnnnnnnnnnnnnnnnnnnnnnnnnnnnnnnnnnnnnnnnnnnnnnnnnnnnnnnnnnnnnnnnnnnnnnnnnnnnnnnnnnnnnnnnnnnnnnnnnnnnnnnnnnnnnnnnnnnnnnnnnnnnnnnnnnnnnnnnnnnnnnnnnnnnnnnnnnnnnnnnnnnnnnnnnnnnnnnnnnnnnnnnnnnnnnnnnnnnnnnnnnnnnnnnnnnnnnnnnnnnnnnnnnnnnnnnnnnnnnnnnnnnnnnnnnnnnnnnnnnnnnnnnnnnnnnnnnnnnnnnnnnnnnnnnnnnnnnnnnnnnnnnnnnnnnnnnnnnnnnnnnnnnnnnnnnnnnnnnnnnnnnnnnnnnnnnnnnnnnnnnnnnnnnnnnnnnnnnnnnnnnnnnnnnnnnnnnnnnnnnnnnnnnnnnnnnnnnnnnnnnnnnnnnnnnnnnnnnnnnnnnnnnnnnnnnnnnnnnnnnnnnnnnnnnnnnnnnnnnnnnnnnnnnnnnnnnnnnnnnnnnnnnnnnnnnnnnnnnnnnnnnnnnnnnnnnnnnnnnnnnnnnnnnnnnnnnnnnnnnnnnnnnnnnnnnnnnnnnnnnnnnnnnnnnnnnnnnnnnnnnnnnnnnnnnnnnnnnnnnnnnnnnnnnnnnnnnnnnnnnnnnnnnnnnnnnnnnnnnnnnnnnnnnnnnnnnnnnnnnnnnnnnnnnnnnnnnnnnnnnnnnnnnnnnnnnnnnnnnnnnnnnnnnnnnnnnnnnnnnnnnnnnnnnnnnnnnnnnnnnnnnnnnnnnnnnnnnnnnnnnnnnnnnnnnnnnnnnnnnnnnnnnnnnnnnnnnnnnnnnnnnnnnnnnnnnnnnnnnnnnnnnnnnnnnnnnnnnnnnnnnnnnnnnnnnnnnnnnnnnnnnnnnnnnnnnnnnnnnnnnnnnnnnnnnnnnnnnnnnnnnnnnnnnnnnnnnnnnnnnnnnnnnnnnnnnnnnnnnnnnnnnnnnnnnnnnnnnnnnnnnnnnnnnnnnnnnnnnnnnnnnnnnnnnnnnnnnnnnnnnnnnnnnnnnnnnnnnnnnnnnnnnnnnnnnnnnnnnnnnnnnnnnnnnnnnnnnnnnnnnnnnnnnnnnnnnnnnnnnnnnnnnnnnnnnnnnnnnnnnnnnnnnnnnnnnnnnnnnnnnnnnnnnnnnnnnnnnnnnnnnnnnnnnnnnnnnnnnnnnnnnnnnnnnnnnnnnnnnnnnnnnnnnnnnnnnnnnnnnnnnnnnnnnnnnnnnnnnnnnnnnnnnnnnnnnnnnnnnnnnnnnnnnnnnnnnnnnnnnnnnnnnnnnnnnnnnnnnnnnnnnnnnnnnnnnnnnnnnnnnnnnnnnnnnnnnnnnnnnnnnnnnnnnnnnnnnnnnnnnnnnnnnnnnnnnnnnnnnnnnnnnnnnnnnnnnnnnnnnnnnnnnnnnnnnnnnnnnnnnnnnnnnnnnnnnnnnnnnnnnnnnnnnnnnnnnnnnnnnnnnnnnnnnnnnnnnnnnnnnnnnnnnnnnnnnnnnnnnnnnnnnnnnnnnnnnnnnnnnnnnnnnnnnnnnnnnnnnnnnnnnnnnnnnnnnnnnnnnnnnnnnnnnnnnnnnnnnnnnnnnnnnnnnnnnnnnnnnnnnnnnnnnnnnnnnnnnnnnnnnnnnnnnnnnnnnnnnnnnnnnnnnnnnnnnnnnnnnnnnnnnnnnnnnnnnnnnnnnnnnnnnnnnnnnnnnnnnnnnnnnnnnnnnnnnnnnnnnnnnnnnnnnnnnnnnnnnnnnnnnnnnnnnnnnnnnnnnnnnnnnnnnnnnnnnnnnnnnnnnnnnnnnnnnnnnnnnnnnnnnnnnnnnnnnnnnnnnnnnnnnnnnnnnnnnnnnnnnnnnnnnnnnnnnnnnnnnnnnnnnnnnnnnnnnnnnnnnnnnnnnnnnnnnnnnnnnnnnnnnnnnnnnnnnnnnnnnnnnnnnnnnnnnnnnnnnnnnnnnnnnnnnnnnnnnnnnnnnnnnnnnnnnnnnnnnnnnnnnnnnnnnnnnnnnnnnnnnnnnnnnnnnnnnnnnnnnnnnnnnnnnnnnnnnnnnnnnnnnnnnnnnnnnnnnnnnnnnnnnnnnnnnnnnnnnnnnnnnnnnnnnnnnnnnnnnnnnnnnnnnnnnnnnnnnnnnnnnnnnnnnnnnnnnnnnnnnnnnnnnnnnnnnnnnnnnnnnnnnnnnnnnnnnnnnnnnnnnnnnnnnnnnnnnnnnnnnnnnnnnnnnnnnnnnnnnnnnnnnnnnnnnnnnnnnnnnnnnnnnnnnnnnnnnnnnnnnnnnnnnnnnnnnnnnnnnnnnnnnnnnnnnnnnnnnnnnnnnnnnnnnnnnnnnnnnnnnnnnnnnnnnnnnnnnnnnnnnnnnnnnnnnnnnnnnnnnnnnnnnnnnnnnnnnnnnnnnnnnnnnnnnnnnnnnnnnnnnnnnnnnnnnnnnnnnnnnnnnnnnnnnnnnnnnnnnnnnnnnnnnnnnnnnnnnnnnnnnnnnnnnnnnnnnnnnnnnnnnnnnnnnnnnnnnnnnnnnnnnnnnnnnnnnnnnnnnnnnnnnnnnnnnnnnnnnnnnnnnnnnnnnnnnnnnnnnnnnnnnnnnnnnnnnnnnnnnnnnnnnnnnnnnnnnnnnnnnnnnnnnnnnnnnnnnnnnnnnnnnnnnnnnnnnnnnnnnnnnnnnnnnnnnnnnnnnnnnnnnnnnnnnnnnnnnnnnnnnnnnnnnnnnnnnnnnnnnnnnnnnnnnnnnnnnnnnnnnnnnnnnnnnnnnnnnnnnnnnnnnnnnnnnnnnnnnnnnnnnnnnnnnnnnnnnnnnnnnnnnnnnnnnnnnnnnnnnnnnnnnnnnnnnnnnnnnnnnnnnnnnnnnnnnnnnnnnnnnnnnnnnnnnnnnnnnnnnnnnnnnnnnnnnnnnnnnnnnnnnnnnnnnnnnnnnnnnnnnnnnnnnnnnnnnnnnnnnnnnnnnnnnnnnnnnnnnnnnnnnnnnnnnnnnnnnnnnnnnnnnnnnnnnnnnnnnnnnnnnnnnnnnnnnnnnnnnnnnnnnnnnnnnnnnnnnnnnnnnnnnnnnnnnnnnnnnnnnnnnnnnnnnnnnnnnnnnnnnnnnnnnnnnnnnnnnnnnnnnnnnnnnnnnnnnnnnnnnnnnnnnnnnnnnnnnnnnnnnnnnnnnnnnnnnnnnnnnnnnnnnnnnnnnnnnnnnnnnnnnnnnnnnnnnnnnnnnnnnnnnnnnnnnnnnnnnnnnnnnnnnnnnnnnnnnnnnnnnnnnnnnnnnnnnnnnnnnnnnnnnnnnnnnnnnnnnnnnnnnnnnnnnnnnnnnnnnnnnnnnnnnnnnnnnnnnnnnnnnnnnnnnnnnnnnnnnnnnnnnnnnnnnnnnnnnnnnnnnnnnnnnnnnnnnnnnnnnnnnnnnnnnnnnnnnnnnnnnnnnnnnnnnnnnnnnnnnnnnnnnnnnnnnnnnnnnnnnnnnnnnnnnnnnnnnnnnnnnnnnnnnnnnnnnnnnnnnnnnnnnnnnnnnnnnnnnnnnnnnnnnnnnnnnnnnnnnnnnnnnnnnnnnnnnnnnnnnnnnnnnnnnnnnnnnnnnnnnnnnnnnnnnnnnnnnnnnnnnnnnnnnnnnnnnnnnnnnnnnnnnnnnnnnnnnnnnnnnnnnnnnnnnnnnnnnnnnnnnnnnnnnnnnnnnnnnnnnnnnnnnnnnnnnnnnnnnnnnnnnnnnnnnnnnnnnnnnnnnnnnnnnnnnnnnnnnnnnnnnnnnnnnnnnnnnnnnnnnnnnnnnnnnnnnnnnnnnnnnnnnnnnnnnnnnnnnnnnnnnnnnnnnnnnnnnnnnnnnnnnnnnnnnnnnnnnnnnnnnnnnnnnnnnnnnnnnnnnnnnnnnnnnnnnnnnnnnnnnnnnnnnnnnnnnnnnnnnnnnnnnnnnnnnnnnnnnnnnnnnnnnnnnnnnnnnnnnnnnnnnnnnnnnnnnnnnnnnnnnnnnnnnnnnnnnnnnnnnnnnnnnnnnnnnnnnnnnnnnnnnnnnnnnnnnnnnnnnnnnnnnnnnnnnnnnnnnnnnnnnnnnnnnnnnnnnnnnnnnnnnnnnnnnnnnnnnnnnnnnnnnnnnnnnnnnnnnnnnnnnnnnnnnnnnnnnnnnnnnnnnnnnnnnnnnnnnnnnnnnnnnnnnnnnnnnnnnnnnnnnnnnnnnnnnnnnnnnnnnnnnnnnnnnnnnnnnnnnnnnnnnnnnnnnnnnnnnnnnnnnnnnnnnnnnnnnnnnnnnnnnnnnnnnnnnnnnnnnnnnnnnnnnnnnnnnnnnnnnnnnnnnnnnnnnnnnnnnnnnnnnnnnnnnnnnnnnnnnnnnnnnnnnnnnnnnnnnnnnnnnnnnnnnnnnnnnnnnnnnnnnnnnnnnnnnnnnnnnnnnnnnnnnnnnnnnnnnnnnnnnnnnnnnnnnnnnnnnnnnnnnnnnnnnnnnnnnnnnnnnnnnnnnnnnnnnnnnnnnnnnnnnnnnnnnnnnnnnnnnnnnnnnnnnnnnnnnnnnnnnnnnnnnnnnnnnnnnnnnnnnnnnnnnnnnnnnnnnnnnnnnnnnnnnnnnnnnnnnnnnnnnnnnnnnnnnnnnnnnnnnnnnnnnnnnnnnnnnnnnnnnnnnnnnnnnnnnnnnnnnnnnnnnnnnnnnnnnnnnnnnnnnnnnnnnnnnnnnnnnnnnnnnnnnnnnnnnnnnnnnnnnnnnnnnnnnnnnnnnnnnnnnnnnnnnnnnnnnnnnnnnnnnnnnnnnnnnnnnnnnnnnnnnnnnnnnnnnnnnnnnnnnnnnnnnnnnnnnnnnnnnnnnnnnnnnnnnnnnnnnnnnnnnnnnnnnnnnnnnnnnnnnnnnnnnnnnnnnnnnnnnnnnnnnnnnnnnnnnnnnnnnnnnnnnnnnnnnnnnnnnnnnnnnnnnnnnnnnnnnnnnnnnnnnnnnnnnnnnnnnnnnnnnnnnnnnnnnnnnnnnnnnnnnnnnnnnnnnnnnnnnnnnnnnnnnnnnnnnnnnnnnnnnnnnnnnnnnnnnnnnnnnnnnnnnnnnnnnnnnnnnnnnnnnnnnnnnnnnnnnnnnnnnnnnnnnnnnnnnnnnnnnnnnnnnnnnnnnnnnnnnnnnnnnnnnnnnnnnnnnnnnnnnnnnnnnnnnnnnnnnnnnnnnnnnnnnnnnnnnnnnnnnnnnnnnnnnnnnnnnnnnnnnnnnnnnnnnnnnnnnnnnnnnnnnnnnnnnnnnnnnnnnnnnnnnnnnnnnnnnnnnnnnnnnnnnnnnnnnnnnnnnnnnnnnnnnnnnnnnnnnnnnnnnnnnnnnnnnnnnnnnnnnnnnnnnnnnnnnnnnnnnnnnnnnnnnnnnnnnnnnnnnnnnnnnnnnnnnnnnnnnnnnnnnnnnnnnnnnnnnnnnnnnnnnnnnnnnnnnnnnnnnnnnnnnnnnnnnnnnnnnnnnnnnnnnnnnnnnnnnnnnnnnnnnnnnnnnnnnnnnnnnnnnnnnnnnnnnnnnnnnnnnnnnnnnnnnnnnnnnnnnnnnnnnnnnnnnnnnnnnnnnnnnnnnnnnnnnnnnnnnnnnnnnnnnnnnnnnnnnnnnnnnnnnnnnnnnnnnnnnnnnnnnnnnnnnnnnnnnnnnnnnnnnnnnnnnnnnnnnnnnnnnnnnnnnnnnnnnnnnnnnnnnnnnnnnnnnnnnnnnnnnnnnnnnnnnnnnnnnnnnnnnnnnnnnnnnnnnnnnnnnnnnnnnnnnnnnnnnnnnnnnnnnnnnnnnnnnnnnnnnnnnnnnnnnnnnnnnnnnnnnnnnnnnnnnnnnnnnnnnnnnnnnnnnnnnnnnnnnnnnnnnnnnnnnnnnnnnnnnnnnnnnnnnnnnnnnnnnnnnnnnnnnnnnnnnnnnnnnnnnnnnnnnnnnnnnnnnnnnnnnnnnnnnnnnnnnnnnnnnnnnnnnnnnnnnnnnnnnnnnnnnnnnnnnnnnnnnnnnnnnnnnnnnnnnnnnnnnnnnnnnnnnnnnnnnnnnnnnnnnnnnnnnnnnnnnnnnnnnnnnnnnnnnnnnnnnnnnnnnnnnnnnnnnnnnnnnnnnnnnnnnnnnnnnnnnnnnnnnnnnnnnnnnnnnnnnnnnnnnnnnnnnnnnnnnnnnnnnnnnnnnnnnnnnnnnnnnnnnnnnnnnnnnnnnnnnnnnnnnnnnnnnnnnnnnnnnnnnnnnnnnnnnnnnnnnnnnnnnnnnnnnnnnnnnnnnnnnnnnnnnnnnnnnnnnnnnnnnnnnnnnnnnnnnnnnnnnnnnnnnnnnnnnnnnnnnnnnnnnnnnnnnnnnnnnnnnnnnnnnnnnnnnnnnnnnnnnnnnnnnnnnnnnnnnnnnnnnnnnnnnnnnnnnnnnnnnnnnnnnnnnnnnnnnnnnnnnnnnnnnnnnnnnnnnnnnnnnnnnnnnnnnnnnnnnnnnnnnnnnnnnnnnnnnnnnnnnnnnnnnnnnnnnnnnnnnnnnnnnnnnnnnnnnnnnnnnnnnnnnnnnnnnnnnnnnnnnnnnnnnnnnnnnnnnnnnnnnnnnnnnnnnnnnnnnnnnnnnnnnnnnnnnnnnnnnnnnnnnnnnnnnnnnnnnnnnnnnnnnnnnnnnnnnnnnnnnnnnnnnnnnnnnnnnnnnnnnnnnnnnnnnnnnnnnnnnnnnnnnnnnnnnnnnnnnnnnnnnnnnnnnnnnnnnnnnnnnnnnnnnnnnnnnnnnnnnnnnnnnnnnnnnnnnnnnnnnnnnnnnnnnnnnnnnnnnnnnnnnnnnnnnnnnnnnnnnnnnnnnnnnnnnnnnnnnnnnnnnnnnnnnnnnnnnnnnnnnnnnnnnnnnnnnnnnnnnnnnnnnnnnnnnnnnnnnnnnnnnnnnnnnnnnnnnnnnnnnnnnnnnnnnnnnnnnnnnnnnnnnnnnnnnnnnnnnnnnnnnnnnnnnnnnnnnnnnnnnnnnnnnnnnnnnnnnnnnnnnnnnnnnnnnnnnnnnnnnnnnnnnnnnnnnnnnnnnnnnnnnnnnnnnnnnnnnnnnnnnnnnnnnnnnnnnnnnnnnnnnnnnnnnnnnnnnnnnnnnnnnnnnnnnnnnnnnnnnnnnnnnnnnnnnnnnnnnnnnnnnnnnnnnnnnnnnnnnnnnnnnnnnnnnnnnnnnnnnnnnnnnnnnnnnnnnnnnnnnnnnnnnnnnnnnnnnnnnnnnnnnnnnnnnnnnnnnnnnnnnnnnnnnnnnnnnnnnnnnnnnnnnnnnnnnnnnnnnnnnnnnnnnnnnnnnnnnnnnnnnnnnnnnnnnnnnnnnnnnnnnnnnnnnnnnnnnnnnnnnnnnnnnnnnnnnnnnnnnnnnnnnnnnnnnnnnnnnnnnnnnnnnnnnnnnnnnnnnnnnnnnnnnnnnnnnnnnnnnnnnnnnnnnnnnnnnnnnnnnnnnnnnnnnnnnnnnnnnnnnnnnnnnnnnnnnnnnnnnnnnnnnnnnnnnnnnnnnnnnnnnnnnnnnnnnnnnnnnnnnnnnnnnnnnnnnnnnnnnnnnnnnnnnnnnnnnnnnnnnnnnnnnnnnnnnnnnnnnnnnnnnnnnnnnnnnnnnnnnnnnnnnnnnnnnnnnnnnnnnnnnnnnnnnnnnnnnnnnnnnnnnnnnnnnnnnnnnnnnnnnnnnnnnnnnnnnnnnnnnnnnnnnnnnnnnnnnnnnnnnnnnnnnnnnnnnnnnnnnnnnnnnnnnnnnnnnnnnnnnnnnnnnnnnnnnnnnnnnnnnnnnnnnnnnnnnnnnnnnnnnnnnnnnnnnnnnnnnnnnnnnnnnnnnnnnnnnnnnnnnnnnnnnnnnnnnnnnnnnnnnnnnnnnnnnnnnnnnnnnnnnnnnnnnnnnnnnnnnnnnnnnnnnnnnnnnnnnnnnnnnnnnnnnnnnnnnnnnnnnnnnnnnnnnnnnnnnnnnnnnnnnnnnnnnnnnnnnnnnnnnnnnnnnnnnnnnnnnnnnnnnnnnnnnnnnnnnnnnnnnnnnnnnnnnnnnnnnnnnnnnnnnnnnnnnnnnnnnnnnnnnnnnnnnnnnnnnnnnnnnnnnnnnnnnnnnnnnnnnnnnnnnnnnnnnnnnnnnnnnnnnnnnnnnnnnnnnnnnnnnnnnnnnnnnnnnnnnnnnnnnnnnnnnnnnnnnnnnnnnnnnnnnnnnnnnnnnnnnnnnnnnnnnnnnnnnnnnnnnnnnnnnnnnnnnnnnnnnnnnnnnnnnnnnnnnnnnnnnnnnnnnnnnnnnnnnnnnnnnnnnnnnnnnnnnnnnnnnnnnnnnnnnnnnnnnnnnnnnnnnnnnnnnnnnnnnnnnnnnnnnnnnnnnnnnnnnnnnnnnnnnnnnnnnnnnnnnnnnnnnnnnnnnnnnnnnnnnnnnnnnnnnnnnnnnnnnnnnnnnnnnnnnnnnnnnnnnnnnnnnnnnnnnnnnnnnnnnnnnnnnnnnnnnnnnnnnnnnnnnnnnnnnnnnnnnnnnnnnnnnnnnnnnnnnnnnnnnnnnnnnnnnnnnnnnnnnnnnnnnnnnnnnnnnnnnnnnnnnnnnnnnnnnnnnnnnnnnnnnnnnnnnnnnnnnnnnnnnnnnnnnnnnnnnnnnnnnnnnnnnnnnnnnnnnnnnnnnnnnnnnnnnnnnnnnnnnnnnnnnnnnnnnnnnnnnnnnnnnnnnnnnnnnnnnnnnnnnnnnnnnnnnnnnnnnnnnnnnnnnnnnnnnnnnnnnnnnnnnnnnnnnnnnnnnnnnnnnnnnnnnnnnnnnnnnnnnnnnnnnnnnnnnnnnnnnnnnnnnnnnnnnnnnnnnnnnnnnnnnnnnnnnnnnnnnnnnnnnnnnnnnnnnnnnnnnnnnnnnnnnnnnnnnnnnnnnnnnnnnnnnnnnnnnnnnnnnnnnnnnnnnnnnnnnnnnnnnnnnnnnnnnnnnnnnnnnnnnnnnnnnnnnnnnnnnnnnnnnnnnnnnnnnnnnnnnnnnnnnnnnnnnnnnnnnnnnnnnnnnnnnnnnnnnnnnnnnnnnnnnnnnnnnnnnnnnnnnnnnnnnnnnnnnnnnnnnnnnnnnnnnnnnnnnnnnnnnnnnnnnnnnnnnnnnnnnnnnnnnnnnnnnnnnnnnnnnnnnnnnnnnnnnnnnnnnnnnnnnnnnnnnnnnnnnnnnnnnnnnnnnnnnnnnnnnnnnnnnnnnnnnnnnnnnnnnnnnnnnnnnnnnnnnnnnnnnnnnnnnnnnnnnnnnnnnnnnnnnnnnnnnnnnnnnnnnnnnnnnnnnnnnnnnnnnnnnnnnnnnnnnnnnnnnnnnnnnnnnnnnnnnnnnnnnnnnnnnnnnnnnnnnnnnnnnnnnnnnnnnnnnnnnnnnnnnnnnnnnnnnnnnnnnnnnnnnnnnnnnnnnnnnnnnnnnnnnnnnnnnnnnnnnnnnnnnnnnnnnnnnnnnnnnnnnnnnnnnnnnnnnnnnnnnnnnnnnnnnnnnnnnnnnnnnnnnnnnnnnnnnnnnnnnnnnnnnnnnnnnnnnnnnnnnnnnnnnnnnnnnnnnnnnnnnnnnnnnnnnnnnnnnnnnnnnnnnnnnnnnnnnnnnnnnnnnnnnnnnnnnnnnnnnnnnnnnnnnnnnnnnnnnnnnnnnnnnnnnnnnnnnnnnnnnnnnnnnnnnnnnnnnnnnnnnnnnnnnnnnnnnnnnnnnnnnnnnnnnnnnnnnnnnnnnnnnnnnnnnnnnnnnnnnnnnnnnnnnnnnnnnnnnnnnnnnnnnnnnnnnnnnnnnnnnnnnnnnnnnnnnnnnnnnnnnnnnnnnnnnnnnnnnnnnnnnnnnnnnnnnnnnnnnnnnnnnnnnnnnnnnnnnnnnnnnnnnnnnnnnnnnnnnnnnnnnnnnnnnnnnnnnnnnnnnnnnnnnnnnnnnnnnnnnnnnnnnnnnnnnnnnnnnnnnnnnnnnnnnnnnncatataatcactaggaatagctgattttcttactctagtagacctccttaatgttggagttgcctaatggggcgaaggccattggatgtaaatgggtctttaagaccaaaaaggattcattaggcaacattgagagatacaaggcaagacttgttgctaagggatttactcaaaaggaaggaatagattataaagagactttttctccagtatctaagaaagattctcttcgtataatcttggcattagttgctcattttgaccttgagttgcaacaaatggatgtgaaaacagcttttcttaatggtgatttagaggaggaggtttatatgaaacaacctgaaggtttctcctctaatagtggtgagcatttggtttgcaagcttaataaatctatatatggtttaaaacaagcttcccgtcagtggtaccttaagtttcatgggataatttcttcatttggttttgatgaaaaccccatggatcaatgcatataccacaaggttagtgggagtaaaatatgctttcttgttttatatgtagatgatattttacttgcagccaatgatcggggtttgctacatgaggtgaaacaatttctctctaagaattttgacatgaaggatatgggtgatgcatcttatgtcatcggcattaagattcatagagatagatctcgaggtattttgggtctatcacaggaaacctatattaacaaaattctagagagatttcggatgaaagattgttcaccaagtgttgctcccattgtgaagggtgataggtttaatttgaaccaatgtccaaagaatgactttgagagggaacaaatgaaaaacattccttatgcttcagttgttggaagcctcatgtatgctcaagtatgcacaaggcctgacattgcttttgcagttgaaatgttaggaagatatcagagtaatccaggtattgaccactggagagctgctaagaaagtgttgaggtaccttcaagggaccaaagattacatgcttatgtatagacagacagacaatctagatgcgattggttattcagactcagactttgctggttgtgttgactctcgtagatcaacatctgggtacattttcatgatggctggtggagctatttcatggaggagtgttaagcagtctttgactgctacttctaccatggaagctgagtttgtctcttgttttgaggctacatcacatggtgtatggcttaaaagtttcatttctgggctgaagataattgatactatttcaaggcctttaagaattttttgcgataactcagctgctgtctttatggctaagaataacaaaagtggaagtcgaagtaagcacatcgacattaagtacttagccattagagaaagagtaaaagacaagaaagtggtcattgagcatataagcactgagttgatgatcgctgatcctttaactaaaggcatgccaccgtttaaatttaaggatcatgtagaaagaatgggacttggttccaatttatgattgtatacatatatgtaaaaattgaaacttttatattatgatattttctcatattttggtgcacattgatttatttgagaaaaattatgttttggaccaagaataaacattgggtttattcatgaagttttattaccactttaagtatactgcttgggaaattgagtatattgtaatacatagatgatattactcgttataagaggaactatcactatgattcatatattcatttcttaagaagattgagcattaagtcaaaatgtttggaccaagtgggagaatgtaataattcatggtcataacattttgaaattttgtaacgctcatcagttttgaaagccattttgaatggttgttaatggatgataatggccaataaagaattgtaacagccaataatgagtggtaatggctgataaatgcattcttgatggtagaatgcctatataagcacatgaatttggtccctgagctcatcccttcgaattcagtcttatacaccatctagagagtggaagagagagagcttggaagaaccaaaacaagaaactcttcatagcaatggctggaggtatgttttgatctgtaatttccgcattttattaataacctgtgtttctttgtagtttgtaatatcacaggttaaaagagatttgttctaacacaatatcgacctctttccatagcttctcgttacgagaagaatttgcacttatatctggcgcgagttgctgcagcaaagagaagatctaatcatttgtatcagctactgtacaaattttctcctcagtttgagtccaaagaccagctgcttgcaagaaaagctttgccgtgggaaaatcaaaaaatagaagccaataattttctggatttgaggagcaaaaaacgcattcacgtgaacaattaacacccttgtggattaaacggtgccttgttggtaagcattctctaaggagcctccataagaaatgtttgaattttgaaggaatattaagatttgaaatagccatccagttaccatgagttttgagatggttattatcaatgatggtatccatatggtcattgctaatggtaaggctggttccaaatgctaatacaattctcatttccaatcctccatctcataccttaacttattatcactacttatgaagcatgatactacatcatataaaacttgaattatgtccaagttgagcttcctaaaaattctcttatgaaaagtatcttgttttcagaacctttttaacaatagcatggttagtcatcattctccaatcattttttccctaacaagtgtagtttacttgggtgtcaatcttggacataattaaagttatatttggcgtaatatttatgcttcacacctactggttgttaaaagggaggacataggatggagaattgacaatggtcagaaaattaatatttggagtcaaccatggttgtgatcaaaaggtaatccttacgcaacttttttggctcctaacggtctcgaagacatgaaagaaagttctatcattgatcaggtgtctcaattatgacacatattgatcttatgtcttcaatcctgaattcaagttatatgggtgacattcagaatcttcctctttttaatgttcataatgatgatattcgcgtatttgaaagttttttgccaatggtatgtacgctgtcaaaaatttaaaaaataaaaataaaaaatcaacatgttatccctccttcctcacattcatgattcatctctcagggatcagagatcttcaccttctccttcctcacatcctccctccttgccggccccatctcttgtcttctaaacagcgtcgcctccacaacttctacaataataaaaccacttcccttttgtgtttcctcattttggcatttctcacggttttgaaatccttcctccacgacttctacagtaataccacactagtgcaccacaaacaaatattgatttttttttttacatttatttggtcgctaagtgacccaataaataatatatgctatatataacattgtgtaattacaagtttacaatcaataattaaattataataaattactaaaactttaattgttaaaaaatattctataaaatgtagctctcacactctagagtagttaaatctgaaaaataattatccagattttatgaagtgaccaaaagattattaaatacaaatataaaattaaatgtgaatataaaaatgtttgtaaattaaaataaattgaaaacatgaaaattatttaatattgtcttcacttagattaacaaaaaaaatagtagcattgcacaaagggggaatatcagaatatgttaaaattgtatataaaaaagtatctaatgctttccaaatttagatcgataaaaaataatataagaagatataaaattattcttctaaaaataaaaataccatattttcatgtaccccttcttaatatttaatgaaaaataaaaattaaataaaaatatattaaatatgtgaaaaatataaacaattgtctttcttatataaaaagaccgaaatggggtaagacttacttcctcctgtctcaaatataatctcaaatataataagaagaaaattcggttcacactaactaaagaaactaattaattttatttaattttattgatttcaattaaaaaattttgttttctaatttatctcctcgttgaaacgagtggaaattatcttctaaagattttcaggaggagaaagaaagacatcaacaatgaatcccacttaaacattaattctccctcatacttaaaaatgtctattaactaaacagaagactaatctaattgaaatttaatatgagaaatagaaaaattattgaaattaacatcataattaaataaaaatattttataaataataataataataataataataataataataataaataagatataattattttaaaaaattatatttgaaaccaagaattttcatttttttaaggtccgagggagtaagagtttaaaaattaagagtggatcctccagttgacagacaaagttctctcacgtaccgcacgagttcctcgcattcttggaataatattaattaattcctagataccagtgtgttgttgaataactgaaattataaaaaaataattaatattggtactagtagatctgcaaagcaataggccactcaaatgattcaacttcttgatgatactggaaacaaaaatttcagcttaaattaatattttaataattaatcatttccttaaaaaataaactaaaaaaacagatacaattcaagccgtatgaatttcattatcattcgatactataagaaataataataaaaattccaaagacaggctggcattttattattataaaattttaataataataataataaattacacaaatctacttttagatttaaaaaaaattgcatacatattcctttattttttaaaacctacgcaaatatttattgaattgtaaagaaattatgcatgtctctttttatttttgagattacacaaatctttcttatttaagaaaattacctctatttttaaaatatatttaaatttaatgttattattgttggtatagaattggttctaataattttatgagttggattattgatggtttgattgagataatttcaaagattttgttgtttaccatgatattcatttaacttatagttttattggtatagtaacttgctttttcactggtctaaagaccggatcggaccaatagattcaatccagattccgtgtccaatccaatacatcctaaaattctatccatccttaaatctgtttttttgaataaaaaaactttcaaaataatatcattttgatttttaaaaaaatattataacttatgaaacttttttaagtaaaatttacttttattattattattattattaatttatacatattatgtttttttttcaacattactagaatattttattaaaatattttattaagataggtttgatcacttttgaatctctattgaatcattgaccccaaattagtgttttcacctattcaatgatctttttaatttttttttatcaaaactgtcccatacttaaagaggcagacaaaaatatatatattttttaaaatactcattaaatatcaaatacaatgcatatttaggaggatttgtatagattttaaaatttgagaaaaaaacatacttaattttcttaaatctcacgcacaagatttacgtaagttaaaaaagagaggaaaaaaccgttgataatttctttaaaattgagttgaggggagatttgtttaaattactctgataataataatcgcgtttaaaaaaaacacttaataatttttcttcactttcaactttttttcctaccgaaagcttagtctaagagtccagtgtctctatatctatctaccatatatcttccttccaaaatccatcctctgcgagtgagtgtttcgttggagtcagaggcgatgatgtcttcaattagattcctatggatcctggtggtgtgtttgacggcatcatgcgcgctaagccaaccgcagaagctatcagcgtacgatgttctcatggagtacggcttcccggtgggtcttcttccgaagggagccatagggtattcactgaacagagacagcggcgagttcgctgtgtattttgaaggagcctgcagcttcgacatagaatcctacgcgctcaagtacaagtccacaatcacgggtgtgatctccaagggcaggctctacaatctcaaaggtgtcaccgtcaaaatcttgctcctgtggctcaacatcgtcgaggtctctcgtcagggcaacgatatttacttctctgtcggcatcgcttccgctgatttcggcgtcgagaacttcctcgagagcccccaatgtggttgtggcttcgattgcaaaacgctccccttaaacggtgacgtttacgtttcctcaatttaattacgcttttctgtgattcaattggtgaaccaacggattattgggttgcaaagtgtagtagatctatctctctcttttttatgctttttaagttaataattagtcctactttttattatcggggtattgtttgtttcccctcaaatgattttcagcataggggattccgccctttgtggtgccatttgcctcagaatccaaacaaatgttacttgtatctggcaatactctattattgtcttgcccaaatccatcatttcattggatatatcgctcttttttattttattttttctctctttttttatattctataagtaagaataataatttgctattaatattaaagaaagtaaatgatatcataatattaatattaatatcgaacatattataaggcatgttagatgtagagtgtaggcaaaacaaggtattaatgtcatgaaattaatgttgaatggttcttatgacatttgagtgtaattcttgatggaaacgtcaaactttacttatcttcccggcggaactacggataaatcaaggtattttctgataaacgggaagagttaagaaaaaaaaaatatagaggcgtagtcttttgtgtagttctttgttttgattgtagttttgtgtagttctttgttttgattgtagacccatcttgacatttttatgactaataatagttcggttatcaaacaccgaactaaagtgcaattatcaatctacattagttaggtagatctttgtttgagatttttgagagaagatagatgataacacacaccccgtacctcacggctagcctttgaataagccaaaacctaattgaaactactcgactaatttggttagactatcagcaccaattttacactttacacgggcccctcctcctctagaatacactccgctgttttgatctggataacccaattttgtatcaagcagtcatttccgccagtgtaggttattctaacataccatcagcttctactcacccaaagaaaattgttattaattttcaaccaaaacccatttatcattccaaaagcaattctaggctccatccttttttttttgttgattattttctcaatcctggcacagcggcaaagttgtgccttggtgactttttgatcatgggtttgaatccggaaacagtctctttgcatatacaagggtaaggctgcgcacaattacccttccccatactttggcttaggaaggagcctttggtaactggggtatgctagtttttttttttcctccatcctatctgtctgcaaaaaataccaacatattaagtagctgcatatgatgtttgtcattcaatagtacgacttcggacttccttgttgggcttctttctaaaggagtgattggctaattagacaactgcaccggcaaatttaaagcattttgattatacttgcacagttgtgagtccatcataatgggtgttatcagaaaggacagaatgtccggcttataagggatcgaagtgatagttttgttttaaacattgtgcgcttgtgagaatcactcagcgatgaggacaagctccaattttcagttggaatcgcttctgcggattttgcggtcagtagcttctatgtatgagagtcccacttgtagttgaagcatagactgtttcatggggttgggagttagatgaaccagtcaagtgattttgtgttatcttctattcttctgttgtgatgcatattaaataggattcttatggttatgatttgctggatgtgtaggtacagcttcaacatcgtaacaatgtgacatttaatgctattagttacaatttctttttatgagggttaatacttacaaatttaagagaataaaagggagcatttttattcaatagggaaaatgggtttacatatatagatgagatgcctaacatgttaacatagggttaccaacaaaataaccattacaaaactaatactcccctcgacttgaagcaaatatattcaagatgcgcaacttggacaataattgtggaaacatgattgggaattgtttttggttgatagatctaccaattgaaaccttgattggacatagatcaatcaaataaatccaggtgccacatgttcatgaataaagtgaaaatctatatcaatatgctaattgatggttaagttattatcacaaaacagtgtggcaaatgatgtgggaagttgaaagtcaacctaaatatacttcaatcaaagtaacacggcagtgagccagtgacaactgcaagcgctcgatattcaactttattagcacagaactgtggcatgtttttcatttccatgaaaatcaaggaaatgctaaagaaaacaaaaaattagttgtggacttgtgggcatctagccaactaccctaacctgcatttgcgtatgctgaaatatttagatgggaatgaggaaacatcaatcattgactaggtgagtctttcaaacatctgagaagattgtgaacaacatgcagataggctgaatttgtgagcaacacaagtaacgacgggcatggaaatcgtgtgattcatcaggcgccaaatcaaagcatcttccataagaataatggagagtttggaagccaaaaaattagtatcttcaaagagataaagtatatttgctctatgaaggatacattctttagaagatcaagcaaccttaaggcctaaaaactatttcaattcaaatcaccaattacatttacagtgtgtttggaacaactttaagttaatagctgaaagtgagctagcacagtattgcaaacttacataaaacattatgcaaatcaagacatgaaatggaactgcatcaaattattgcaagacttggcttaagccataaagagacttgtgaagttggcagaccaagcctgaatcctccacttgatatccaagtggtaaattcatatacacctcttcaaacaaattgccaccgagaaaagcgttattaatatcaagttacacacgaggtcaatgttatagaaagcaagaacctgatagtgcttaatttgcaagttgcaaccggagaaaaagaatccattaaatttatgccaacttgttatgtagccttcggctacgaatcaagcttcatacttgctccgtagaaaatacaacgggcttgctcagtcaaccagcagaacggatttatttatcaaatagaaaattatttcttttaaagcaaaaaaagctgagacaaatccactaaaaataaataaaattatttattttatgaaaataaatacttatttcaataaataagtttaaacaaattgatgtttttattaacttcatgacctctaatttgtcgagtgttatgttactttagatagaaaaatgttggtaatacatttttttttaaaacacgtttttattgaaaattatataatcacatgaattttactctttatttactctcatttaaggtaaatgtttctttaaacattaattagtttttcaataacctgaaaacataaacaaatatataattttgttttaattctttgaataagaatagttttgtcaaaaaaatcattttatcgtaataatttataaaattaataatcttcttttaaaaatgtacattaaaacataatcaataattcaatatcagaagaaaagaatatctaataaattaataataataaaatctgttttttttaataaattaattaggtcctctttgatcatagcgaaacgccgacgtttagtccccctccattccatcatcccagaacatacaaaaccgtgaagtattgaagccaccagagtccccaaaccccaacccctaatcagatttcaattcaattccaataatagagggactacgtccgacaccgccttcctcctcctccggcggtcaccgccaccggcgccccgacggcgtacgagatgctggagagctttcactttccggcaggcattctcccgaaaagagtgaccggctacgagctggacccgtccagcggaaaattccacgccgatctgaacggttcgtgcagtttctccctcgaaggttcgtaccagctgagttaccagaaaatcatcaccgtctacgtatccgacggcaggctcaccgaactccgggggattagcgtgaagatcctcttcttctggctcagcattctcgacgtcgttcgtttcggcgatgatctcgatttctccgtcggcgtcgcctccgcttcctttcccctcgataacttcttcgtctccccgcagtgcggtagcggcttggattgcgatggttttcgaattaggaaactcaaattgagaaacggaaaaccctccctttcctccgtttagaaattcaattcaatccaattctcctttatttaactatgattatttgtggacgcttgtgttgtatgttgtatgatatctcttgttagatgttgattttgtatttttaaattatttttattttcttcatgaactttttaatatgcaattaatttttcttaaaaaaatactgatatcattatttttcttttttaaagaaaaaataaagataaatacatgaaatgtcttttttttttcaaccagttattataattgcacatattatatttattgccgctgaaaacggtatgatggattttcggttttcgtcatgatgatgggataaattagtaagtttttatgatctgaggaattgtttataggtattatgataatttatgagaactagtgtgagtgcacagttccgattctggtcagttcgagactcaacggacctagattttcgttccccagacaaaaaataaatgaataaaaatatttcttaaacaaccttaatttggctataagttgagagtgaaagaaaaaaaaaaagagataaatagctgataaagtgtgatagaaataaaaatagagaaatggaggggggaaaagagttattaattgctgcagaaataattctggctttgacattatttattatccatgcattgagttcatctgataatgaatgaagaagtggaattatacaaggacatgcagaatcatagcaaatattacaattagcatattagtatctcactgtatggttatatttctcaactgcaaccaagaaaggtgaagcttgtgttggatttccacatcccaaattctgcaagtagcaatgtagattcacctagtgaactctccctggtctaggcctgagtcaagctcataaccgaaattaattcctcgacgatcatatcttattaagggatatatctcccattatgatcattgctaatggtaaggctaaaaactaggaacaccatagctgatcttaatagcatattcctttataggaatgtaagcagacgagctttaatttgcgtgtgtaaatatgaatatgtgtatatatttacacacgcataactaagacgtattaagtaaaatttagttattacaagtaaagagaattataaatttaactcatacaattatacgcaaacaattaaaattaaaagttaatgaataatcatataattactttaaaaattgtatatacttacgttttagtattaaatatttaaatatagtataatattctaaatttataattctcatttttcataactagagtttttatgcgataagtttcctgtatatataatcgacaatcaatattaaaagaaagacacaaataactttttttaagtactcacatactcctcaattaacttttaatcttaaccatctataaataaataaaatccctcactatattataaatatagattatatataattatataatctaaatttataattcttatttctataaataaataaaatccctcactagataataaatacgttaaataagtcgaaaactccttctactacgtacacatatattaaaaatcattagtattatatgtgtgtaaataatcataattaaaaattaattagtattacataactatatttttatcagtagtcaataactatttaaaaaaaattatgtatatttatcttttaatcttaaccatacaaattattttcatttttctctcagtagtactttttcggaaacattttttattttctgtttgaaacggtgagaatatgcatgtatttagaattgttgaacataatagtgagaacttttttttttataaaatcaaaataattctcttactaattaggtaaaattttgactatttttatattgtcctaatatgaaatatatatttttataaagtagtaattgctaaaaagacattaattgaaaaaaaggtacagtacatgatattgtccgttcaataatcaacagcgaaagtataaaatattgcaaccaattaaataaacactgaattatcaccaccgtcagctatcataatgacaaaacaataaaataaggtgcagctcgattcattctgcagaaatgatagttcggttgtttataaaactaagaaaaatagaaaatgattggagggtaagcgaagttggtgctacaatacaaccatagccacggccaattatgtttgcagaaagtggagcaccgcccctctatcattccgtgtttaagtatgggaatgttgccatgctttaaagtattcaatggatttggagtactataacacattcaattttcacataaaattaaagaacagaaaaattatggaccttaagcttaaagcctgaaagaaagcgaagaaaataaaactccccccaacaacatcatctcctgtaattaataaacaaagaaacgttgataacacgttaatttcttaatatatttttatcattagttaattgtttaagaactcaactttcatttggggaaaaataatttatttacaagcgattaaattgactttttaagaaatacaccaatgataaaaaaaaatttgttaaacataaattagcaaaatggtactaactttactcataattaagaatcatagtcaagatagtaatatgcgcttcaagtaagcattattttgcttcctaatgtagtttaacgactaatctattcatatgtttgagtacctatgtttgtaaatattgtattaaggaatccaattatacatatgcgcatgattcttaattaatacatcaaagtcatgacactagtctaatttaaaccgattcacttagccacaaaaaattaaagtcatttaaattaagtccttaaaacctaggttatcttgtcttgaactgaggttaatatactttgtatcgcacaagtcatattactcgatatatacttggacacatgtcttatattcgggcatgacaaacacgacccccacgaacggatacttaataaaatagtgaggaacaattaccaaaagataacttcctcccatgcttcgtatatactcaaccagatagagtataaggtatgttactcattctatacatataaacatctcaaatttaactgacttggatcatcataatctcttttacatatatttccaccgaccaccatagattggaacaaggagatatgagattatagcaacactaaacgaaggcgcagattaaattactcgactagatttgataagaagatgctctattaccactttttcttgtctaacaatctcaatgtactacattttaggaggacagtgtaattaatccattaaaaaataaattcctccttaattatgagatttctaaagactatttatcaattatcacatttcatttcattgtattttgtctgtcaaatactctgagaagactacaaaattaacattggcaattaatcctagcagtagtagtagacatcttccctgcatctcatgccttgatatgatcgattgttgatttgtatgaatccactcgagttggtaaccattataagtctcaggacatttcccttatgtaggtgttttcttttacccatacatgctattactatagcaaactcccattaaacttgaatttagaattactataactatagagcgctaggtgtcaacatttcttctggtgtgcttaaccaatgtcaaaaggttacgtataaatccactctgaattatgaattatcctcctcaaaatagtagtttcgtcttttggcatacatggagcattttaaaaatcaactttcttttccttgacaaatcaaattaagaattctgaaaaaaatttataactaataataattgttaatgactctcaatgtcaacgattagtttcaaacttcataaatccaatgtatgccacccacatgttacgctcatcaacaaactattaattgctttctatttcaaaataattttaatttttgaaaagtacttaattatttgttttcaaataattattatcaatgctcttatgtatatttggtgaaaaatactttaaataaataatattatcttaattttttaaagcaataaataacttaaaacaatttttcataaaattaaaaatatttcgaatgagataaactcaatacatttagatgtttcaattttcatttcaatatatatatatatatatatatatatatatatatatatatatatatatatatatatatatatatatatatatatatatataaatacactaaatatataatattatattttttttttatagcaatatatatctaaaaacacattttctcaaaaataaaaatattttgagtgagagaaacactatacatatatatatatctatatatatatatatatatatatatatatatatatatatatatatatatatatatatatatatatatatatatatatatatatatatatatatatatatatatcgccctgacagtgggtgagaagggcaaaagttgagggaagacgtggtgtgctaatctttagccattagggacttgtggtttcaattttgtatgtcttatggtcctagggattctgcattaaatgaacacgagtctcatgcatggatcagtaactttaagatgaaatcaagaaaacacgttcgtgaccacaacacaaacttgtggaggaaagttgatcgatcggattcatttaattacgaaagcatacttatgtggaggaaataaaaatggacaggtacgcaatagcacccttatgtggacgaaatagaaacagaaaaggagggtttatactttatagagatttgcatagaaagtttcaaactactcgtattattcagcaaaagagaattcaactaaagcatagtttgagtattcaacatgagatccaatcacactagtagacattaatttggccatatgctagatggcccatgctgaataatccccgaaggttctgtgaacttcgagagagtcatatatgatataacatattcaagtgaccaaaaaggttattgaaattaactagctagcgagctagtggttgaattttttgcccaaaaccgtggctctcagctcagcaacatcaatctctttgatgttctccggtttgtagtaaccagtgacagggtctgggacccacgaaaccttttcagcacctcctcctaccttgtcttcccctgacttgggagctatcttgctgctgatggaggcagctcctcctcttgttgcgctttgtgtcgctgctgcgtacccacgcctgttccccacacaaaaccaattccacataacactaattactgctccaccgtcctaaaaataattgttgtataataaaaaaaatatatgtttcaaaatattattattttattttttaatgtattattcattattttttctatttatacccctaataactatcatatgttacattaattccaataaagaaaattaatttattaatttatattttttatttgtttgttttaaaaaatctagaatgataattataatgagataaaggaagtatatttcattattaatccctcacttcattattcaatttttaataacccgttagaacaagaatcccccttttcataaagagaacaataaataaccccctcaggccaaaatttaagccaactattgtggcttttgaaaatagagcgctcaacaagttatttaacaaaagaaagagaaacgttagttgtaagttatttattacaacattttattttataaaaaagctatgtagtggatgagatgaataaagagattaacgtgtggtgtgataaacaaataatattataaaaaattacgtataaaataatactctaacttaaggaaattaaagtgggaaacagacaacttaatttccttcttttgttgtttcttgtcaagtaccatgtatttgaattctgaagagacagcctagcctaggataagaaattaagattttgtattctatgaatgaaaaaattaataaaatgagaaaacactctaatattatccgacagaaagttgataatgttggaactataaatagacaaactcatatcacttagaaaattactgaacgtgctgaaactgcaaacagttttttgataaaaattgagatgagaaacgattgtggtacctggtgagagtgttggagaatccgtcggccacaagagcagagagaaccttgacgttagagaaagagcgagccattggtgattcaaattggtggaagctagctagctagggttttcaactgcggaaagcttgttccttaattagaagaaaagtgagatgaaaaaacaagatctccacagaagaacgaagatcactagagaaacctctgtatgtggtctggaacgttcctcaaggcaagtaattatgtttatttgtgagtggcagagacaagtggtctggtcgggtatatataggccaaggagaggggacgcgtaaggaaagaaaaaattctttgcatagtcagttcgtcacgcaagatacgagcgtccttagaaaattcctctctttcacaccacacctattcgttgatacgtagagccattattgtacttgtctttatttttttatcaattgccaaattcttttttttcaaaacaattcgacaattacatggatatatcatgcatataggaattatacatgtacttgtccaatattttttttaagaaaaaaatacaagttctaaaataatttggtcgtctcctcaaacaacgggcgtgtggacatacgaaaaaaaaaaggagagaaaaataattaacaagtgtacaaacagataagattgaaaatgatcattttctttttgttaaactaatatgaatcataatttattagttttaccgtttcctcgatacaaacgggtagaaatatcaaaattcagagcaatatcaataatttaatctcatcagaactattttttttttaaaccatatatccttcaatcaaaagtcaatgattaattgtatttagatctaattaaaagatcgacatttataatcacacatttaagaaacaagatatctatcaattatattacatcatattgataaataatcacaaaatttaagtaagttaaatacattgatttattttttcgatcaaaatttgttacaatagatcacaaaaataaggatcaatcaaaataatagattttgtcatgtaaaaaagaagagaaaaaaaaaaggagatggcatagatacttttcacgatcatgtttctaataatctttttattattttaaaaataaactattaaattaatattaagggttttaataattttatatatagtaattaagatttttttaaaactataaatacaatttggatccatggaacgatgattgccacaaatgagcaattatgcgaggaaaagtgggcgttcagcaggcttaaacatacttgatagatccagtgttctccagaagaccagaacgaccgttgtttcgcaggagagtgtgacatcagacgatccacgtggcgattctgaaagagacagtggagcaggttttgtctaaagaatcttaatattaatgctgctgtgtttgttacaaaataattataagcaaaggaaaaaaaacttcaaattgaaatacaaaaaataaatttaaagaattttttctttttcttttaactaaataaaagtatatgttcctcatttttttctcgattttctttctttaattccaaataaatgtagctgaaggagtcaaatggtggtggatgaacttgggcttgttttgactttacaactttgccaacttgttcgtacatgagttaatatatagacgctaaagaatggtcgtcgatgggaatcttccaatgccgattgacaagttcattcttagtttcctaatctcggtatttaacacatgtgctggttaaccattcgcaaacgcgcttcattacaagacacaaataatgttatgtttggattgaaattaaaaatattcacaacatattttaatgtaaatttaacctataaagtaaaacaaaaataaaaatcctgattttttataaaaattacttttgtttaaaaaatatctttttcacctgaatatcaaacatacacttaatggattgtccttaatgagatctcatgtacaattatgtgaggatatacctatcaagtcatgcggttcttcttaatttatgtaaaattgaggcttaaatcagatgtcaagaactaaaaagagataaaaattataatttaatcttttttataaaaagaaactttaatgattatagaatgtcaatataaaaaaattacaatattaatcaataaaaaattattatcactgtaacttttaaaatattattataataattgataaacatattatacatgtcgattgtaattgaacaataatataaaatttatttacattattaatgtatgaaaaagtttaataattatacacccttgaataaaaagatttacatttacaaatgctaacaaataaaaaaaattattgatatataacttttaagatgattattatttaatttgatgacttctcagtcttctttcatcgagtcggtagactggaagacaaatgtggagagaaaaaattataggatttgcaatagtggtagtgaatgaaagtttttaatattttttttgttaatttaatttggtttaattatctttttatttcatgtaatttggatattttattttttagtatctatgaatttattttggtcattttaatccataaaatttagatattttgttttttagtccctggaaattacaatttaatacatatattagttgccttttaaactaatctttcttataaattatcaattatatattttttattataaaataatttttaataaaatgttcctactaaaagaaattaaatacaattacgaaattatctaaatgcttaaattgtatatcaataaataaatatattgttaaaagatatttttattttataaaatataatatttaaagtcacatataacagtgacgagtgacgcatggaagttaaataacaaattaccctttggggaaagacaagagccgtgtgctctactttcactatggctatatcctatataattggctccaaggtccccttgttgagccattatgagtttctgacttttttctccacttgcatatcttagctgttaattaatgtactttttttttttgaaaaatgtaaattatattaaacctaaaatgatacaacaataaacaggacatactcgtagatggagaaaatcaaaagtcctcctaatacaaaaaaagtttatatcaagatgctaaaacaaatataacaggtgcgcttgtctatacatataatcttgctaataatctctgttacagttaagattgataatcttcaaaaatcagcttgttcctaaacagcccgatacattatactctaattgctatagctagaatttttccttaaacacctgatctaaatctacccctattaatgcactttatttgatattggagagaatgtagcataacataaaaaggttaaattaatgttttgtttttctaatttattatttagatttaatttgattttttttattttttggtttaatttggttctttaatttttaaaattgatctcatttgcttctttagtttttttaatttaatttgattctctaatttttaaaatttatttatttttaaaaaaatatgtatttagtgatagttttgaaccgtcacaagtgtgatttgttataatttaaactgaaaaattaaattaaatcaatttaaaaattaaagaatcaaattaaactcaaaaaataaattaaaaaactaaaaaattaatttaacctttaaaaaattcttacaataccatatagacattaattaagaaatacaacattaattaaatgtactaacaatattcttccaataaataaattgttgtgtacggtaaaacagaacatttttatgataacaattgttttaaagttgtttatgagataatttttaattgatcgattgtattaaaatgttttatactaacattacaacaaaatctaactatactaaatattattttcaatacaaactattattttataaattgctattaatacttaaatgtttgatttgcatttaaatttcaaaaaaatattaggtctgccatttagacttttggatgccaataggacggcaataaattagtcaatgaacctaatcataggtacaaagatagagtggaaattgagaatagatgtaatcatccttgctagagcatgaacaacaccattgtctcgcctccaaatataacacaagattatgaattttcctttgatgtcgaacaaaaatgttgaagcaaatgtaaatattagcataactaatacatctttagtcatggaaaggaatgaaaatagatgaaagaaaatgaaaaaaaaagagataaaagtgagggtgtttaattaagatgaaagaaagtgtaaataaaatgaaaattttgaattaaagtgtttagatgtgtaagaaaaaaaattgttcattaacacaattctccttttaccccttattaatgtgttttttttttctctagaaaaaaggcaagttttttttatcatctacaaggcatataatcgaggcataatcgataacccataaaactgacaaaagtatcagtttacataccatttttttttatgagtgaagtatccgattattatacaaaacaattaaaatatataaataatcacatgtgagtaaataattaattagcaaattaaaaaaaaaagactaagatagaggcgctacccagcagtaaaaatgagaaaggtggcggtaccatgagtcgtgagagcactagtaatgtgaaattgtgaaaaaaaaaaaaagtattaacgttccgtaaaagcaaggttagtcatggaaaaagaattcagcgttcctctctctcttgcacgttccatttcagtgcatttcatctcgttttgaacttttgggggtgaagatattattcattgggacctaacacttttttcaaaactttcatatttattatattcttaccaaacacaattagttaggaagacaaaatcccccagaagttatgaatacctgcaaaaatatcacagatgaaaagagtaattacttttttgttgggacttgaaataagaataggcatttattcgtttttttttattagtgcgggtacatttattataatacttcctaattaaaatatgtatttgagtaaataatttatatttaaaaaataatcacctcttaaatcatttaatattataaataatcttaaaaagtcattaaaattatgacaaattaactaatttaatcgattatattgattttgatggattagataattatttcttatacacaggagcatgtgtaatattatctatagatacttttaatgttatgttttaagtatttaagagtaaattttcaatttatttataataattttttatattaatatatttttatttattttattaactttatatataagttaagtataggtcacgtgtgtaaatatggatttataattatccaacgaatataagaatatgaattaaaattattatttatgtaggtatgagattatataggagtatttttttttaatacaaacaacaagtaatataggatctattcattttcttccttatccttaaggcatggttttggtacatgcgaaagaaagggggaaggaggaaagagagggtgacgtggtgatttggttgagcaaaattttaaaaaaataaattgatgggacctatcgttgcagacttccactgtcatacgaggagatttatacagaaatacaacatgttacgttactatcctcacatctctcttacattaatagcttgggagatttgcaaaaattcaacatattaatcttaaaaagatattttcataaatcctatcattctgttttaattctattttttttatttctcttcaaccaagttatctctatttccatcttatatatatcttatttatttctcttctttttttcttgttgtatattctcttatgttatctctttttctcttcccacaaccaaaagatacccttaactcaagttctatatcattcaagttcttggttaattctcaattccatctacctattgatgtaaattgtcatgagattaatgattcttcgtagttgcaaaattttgaatgatctgaactatggtttagactgtttagtgcccattcctccccccaattgtgtatttctttttggaatatcagatgattattggacagagatattaatatttgataattagttgtctccaaccctaaagtagttatgaaaatttgttgctcgagttgtagaaatcattgtttgccacgtgcttctccagcagttttttctgtttattcaactggttttgctgactgcatatatcaacttttttgcagaaccagataatggtggtgacttccttgtttacaatagatgggaaagcgtaggtgtaaagggacaagacaagatacatggcccttttaaatcatgtgagagtgccattcaggaatttgaacaaaagtttttagccaagaccaagaatgcttggtccagtaggaataattttgtttgctatcctaaaagttatgcttggttggaaatggactacagtggcaaggaaaatgaatctactgtgagttatatgactctattgctcttgcttcattttcattttctacatgtaacttgatgtgcctttttgcaattaactctggttcgcttgcccttgatcatgaaattaattccctgtctcttttatgaaaggcattcttatagagtaaacttcactcttttcttgccaatggtgaattggcaattggtactgtctttacttggagtgttaatggtggatggggagcaaaaggaggaagaaactatttcgattggtcattctaaacacttggatattgcttttaggttacagaaaatcctgaccatgctttaggaaagcagcctcaggaatctaaacttgagccacgtgttgcaaaatttatatctcttgtttgcaatgtgagcatgatgaatcaatgatatgcttgacattctgttgattaatttaaatcaatgatatggtttccttagattcaacttatgacagtcaatactcattatcatgtatctgaattcctcattctagaattctgatattgtctcattcaatattctttatctacttaaactgtgggatccttactttagggtacaatgcgaagaagttgccccttggaaaattgagcaaatcaacaattttgaaggtaggcttttgggcacatcatgtttttctgctttggcatttgttgtttttatttaatattcctttcaaaagtctatcacacagtattttcttcttttgtcactcatgttggtgaaatcaacattcttcaatactattgagcttttattatttctccttttatatgggtaattcagggatataatcatgtacttatgtgtgagaatagcaaaattaattcatttgtagaacgagcccaagttttcatattattgagaagccttttgatcatggtgcaaaagttcccttgtaatagtgactttgttttcattattttggactctagagcatttcaacttgcatgcttttcttatgttgtcttgttaaaaaaaattaacttatattttgtgaattatttagggctatgaagttctcaaaagattggctaatgtgattgataaaggtgataggaaagttctgaaacaattaagtgggtaagaaattcggtgttcttttttttttttccttgatgtgctatgctctatttttcctttgaaatacatacccttttcatttgcttttgaaagagttgtgtgctgtttatctatattataattcattttctatcatttgaggttgggaacttttgctttaaagatattggaaaaccatatgttataattggtttatctgcttgttgcagagaattctacactgtaattcctcatgattttggattcaaaaaagtgcgtaagctatctctctctgtctcatttatctaaagaacacatgcatagttttattatataatggttcaaaatcataaataaattctcgtggtgcttatgcattatttttttagaggaatattaacatgaaaatatgaataatggcaggtgagtttgtgatcgatacccctcagaagttaaaacgaaagttagaaatggtaatccttttcccagatgcatgtattgacctggttattctggttgctcatagattatgattattattttcttatatttggatggtggattctcttatgaggattgctatatacataaattatatactttcatttatgactctgttggctctcctgttagccttggtagcttcctcttgtccccttggggccaacttcaattttttgcaatattctagaaaataaacttataatactttctttgtttaaccattgacattaattgattccttatactcaaaggttgaggctcttgctgaaattgaggttgccacaaagctcttgaaagatgacgcagaaatgcaggtatctctattttaattatcttcttgtagttgatggtcaatatctagaattttttcagtcttttcaaatttttttccctcggataattcggttaattattacagataatatccttatcttttcaagctccaaggataactttatgtaatgagcttgatgcctatgatataggctggagctaaagtgtagttattatagataatatactcatctcttatcatacaattctggatgtgctgcagggagatcctctgtatactcattatcaacgccttcattgtgaactggcaccagttgaatttggttgtgtggaattttctatggtaaacaactatgctgtctttatagttttgttgcaaaattgaaaaggtaattactatgacaaaaaagagagtcgagaaaggcaaagtgaattctaaatggtgataacgtttcttttcacctgatataaaataccagtttgttcctaagcataaaaatctttctgcaaaattgcatactgcagtccttaaatttgacctgttgctggagcttctgttcttgatcctgacaatatcatcgtgtcccttttgatttcactagattgaagagtatacgaagaacactcatgcagaaacacattcaaactatactgtggatattgttcaaatattcaggacatcaagagaaggcgaggcagaacggttcagaaaggtttggcactgtggctaatgcatcattgaataaggatcttcctcccttaatttttcttctagtaagaatgtaactttgtaactcaaagttgtttcagtttatgatatgatgtttatatgtagacattttgcattgaattgagccaattgtcttcgtaattgtcactattcttattagttaacttgcattattgagtggtctatctaatacgacacattatttattattagttaaaattagtgtgaaatcaactaaattgatagtaggatcctctaaatagggagtgggacccaacacattcaatgagtctcacatgaatttcaattaataatagtgttttgaagtgcgtatctagcatttctcattatgtaattcaatgacaaaatctatattgatcaattagtttgcatgttttcatgtactgtcagtcattataacaagtttttatttgagtctggctcttgaagcctgcctccttgtttgattccacagctaattccagttcattgcttttaaatgcactagtgaatctttcatataggttcaaatattgtgttttgtattctttttgcttttactagtaaagtttatatgcttcgcaatctcatactgcagcacaaaaggattaggaggtactgctcttgatccttcaaaagctcaggaacttgaggatgggctcgtagttcccctaggaaagcccaaaacagaatcaggcaaaaaggtatgcactagaagttaaatttttattagcagggaagtttgttgataattgtcatgatttaatacttcacatttattctctatcactttgtattgcagggcgatctattgtacaatgaatacattgtttataatgtggagcagattaggatgcgctatattgttcacttaaatttcaattttaagactacaagttagcatccaaacgattactatgttatttgtaacttcatcatcttctagttcgcaaagccaatcagcgatgattattatcaatgtcaagtatttttacaccgaaaagtgatgaagtttgcactgttgctaagaaaatgaagtcaaaggctagccagtgctttcgtatctgtggtaatatcgtaagccaaaagaaacaaatggaaactaggatgacataattaagcgaggcaagaaatatgaataaaatcgctataaatatagcgaaatttggttttgaatttttaatacttcaatttcttttttagttttagttcttttaattttttaaatgttatttttgtaatgatgtacatgcatttaacacgttatgtttgtgaacgatcgataacatggtaagtgtcttggtatgtttagatgtgtcaatgatttttttttttgaaagactgaacacaaaatgtaccatatttaaactcggataatttactactgcttggcaggggcaagcaagtagaattattttctttttcttcttaaattaatctagcatcagcttcctgtgtacttgtacaataaacggaacatatcctacatctagagaaaatcaaaagtctccctaatacaagaatgcctatatcaagatgctaaaataaacataacaggtacgcttatctatacataaaaaacttaatcttactaataacttctattacacaaaataaaatgttttcctcattgtagcaacacttgtcacgaaagttggacaagatatcagatatgcattgcatggttttttcaaaagctccagaataaaaaattaaatgacgttaacgagtctaatgattgatacttggtgcatgagaataaacttacgcggcccatattcgtgatattaatttgattttacttgtattttgggtttaaaacatattttatcacaaacttattaactctgtttctcagttaataaataactttttaccataatgattttaatcaaattatgtggtattctcgtcgttatatgtcaaattctagattttaagccaagttagcaaatctaataatttgaagttaatgtatagaaatgaacttaccttttccttatcttaacaagttccgcatgtcttgttccaccttgttaatgggaaacaaaaaagaaaaactgtagggcaaggggtagtggtaggttttaattccatactggcaaattattgaacgaacatatgtttctctcccatgtgactgggttcggattcgtgcaaatttaacgggtaaagaaggaatggctttttgttatgttgctgttcctttttctgaagcatagtcaaacacattcatcaagtgcagtagaattttagcagcttgggagcatgattgagtttcaaaaacctttgaatagttgcagtgccagaccaaataaagcatttaccacataccaattgcagggtgcacacgccaatattaaagtccttagatttgataatgacctcatccagaatctatgttcttctcccacaagataaatagagcatggccaatttctaaagccataactgctccaatatccatatttaatgtgtgacactagaaaatcaccctccccctagaagggcttcatcggttctttaatgcacaagacatgagtgcatgcaaaatttagaaatccactgtgacatacgagcctgtttcatttttcccttgaaccattgtgcataattaatttcaattgaccttgcagtgaaccaaacagcaaagagtaatgatgggctgcgtaagtgtgacctatgtagaaactgaactaggatttgagccattgccgcacgccacaggctctcgcatgctattcactagacttttttgtaatgtttcattacacctcctcccccccaaaagggaaaaaaaccctctcaaaacagggcttatagggattctctatcgtgaaattgaaatagtttttgtcctagctttggatccaccatcaagtggtaaagacaaacatgagcaagtttgttctgcataaaaggcgaattattcatacgtttcaacatttgaatgtaattgttattggtattaccccaagtaaaagactatgttggtttaccatttggcctctcttagacttacgtttacttaataaactcagcttgctgaaatgtttggtttttttttttattattcatgagaatcaaagacaacattagagaatttacaataacttacacattgttacttaaccaattgagttatattatctcaaaagtacatttgcatacttgtatttggtttgaaacaaagtttaaattgatgaaagcaataccaaattattattagaaattcagattgcaaaatgaaatcaatgtatacttaaacttacaaattttaatcaaaacatgcactatatcattatctagaacaggtttatgaggtttgcaattgattttgaagtacctatgactcatgctttgctgaaatcaatggaaacttatcatagatggaagtagtgtaggacttttcttacttgggcacaatggctaatcaataacttctcagtttgtgtccttgatgggcagtgttaaggcatttatgttaccctttgaaattgtagtagtgtagagtgttttaattaaacagctaaaaactttggggagaaaaggtaaggggctattggatatagggaatgatatcaacctagggagcctctcccaactttgtcaaatacacatgccatactcaaaaacttgcagccaacacgcaaagcctacgtgcactcatacattattcttctccaaaggaaaaactaaaaaggcaagccaacatgggggagccacgtatgcatgtggggcccaacactctggatccaaagggctcggtcgtaccagtactctgcactgcagtgaacctcaaatgaacaaaggggttggtgacctttttatgaaattaaggcagacaagactccaatcgggtttccttcgatatcccttctttgaatttctgtgtatacgctgccatcatggcattccaaggcgtatatgactttcattttcagttcactcattgctcctgccacgctgcttacattaatctctctctctcaagttgctacctataaatactgagcctctgctaccaccctcgcatactcaaggcgtgcagtaatttttcttcactgggtgagaagctacttgttggagaagcagggcacgtgcaactctctcggctctctttaagcgccattgaaccctttgcacgtgctccccttctccaacacggcttcctcaccctccattccctctccttctcggttactccggcgagtcatgccacttcatgaaggtagttgctttccttccctctttgttaatttcccccgtaaatttagttccaaatctacatcatgactcttcttcttcttgctgctgttggaaacagtgtgaaggatgtcaatgttacattgtggtctccaacaaatgaaagattaattaccattttatctgaccaccctatgagcagtaatttcatttcatcactgagataacatatgccatgtgtatatataactctggatgtttaagaactatgaacacattttgcttttcttctgtggacggtgccaatcactactagtttctagtttgaaagtggacactataaattgtacgttcgcttctaagcagtagtttctgaagttgaggacatttagtttcaattcaattttttgagtctcggaatgcaaggtaattcaggcatctgacacgtaacagcggggccatggaggatgagtttgtttgcagtgtaatagtggaaagtttcaatttgcaaggcttgtagtgtaatcgaaaatgatgaaacatgttaatcacctggtacgacaatctagctgtccaaatgcatttcgctgtcaaagaatctttatcaattgtttattttaggcttatagtctgtctggaattaagctcttaaattgtatatgaaaagttttataagaatgtttttattcaaaataaactaacctagatatatacaaccgtcagtgtacagtgtgaaaaagattcaagtactccgtctccaagttcaaaaagacatggtgttacgtgtggaactggaacaactgttttacaccaatgtcttgtgccaacactatttgcaggaaaattcttatgaagaaacaacaccgttacggggtccgaaaccgcagttctggatggagttcaagatgatttcttactgttatgagaaaatatatgtactgttgtaccatttttcttttctttataacattaaaaaagaaaagaaaagagaagtgtggaaaattataattggtgtattagataaagtttccttgaaatggagcttcatcaaggaaactttggaagatttgagttcaccccataattttgtgaatttggtgtggcattgcatctcctcggccaggatgagagttatctcaaagggaatctgtcaaggagatcccctctcaccttaactttttgttttatgcttggaaagactcttccagttgatcaatgtggcagttgattataaactgtgggatccgatgcaaatatccaggaaaggtttttaagttagcttatcttgcctttggggatgatctgctgctgtttgcataggcagaaactactcaaatccaacctattcagaaagttgttcaattattctgcaattcgttgggtcagaagattagctttgagaaatccaaaatctgcttttctaacaatgttccttgggatcttcgaaatcagattggtgaagagccttgctattgcttgtgaaaggggttgcaaccagaatcatccttgtttcaacctggttaaggagatcaatactcttgttgcttctcatgtgttccgggaagccaaccaagtggcagatgctttggcctaggaagttctaattatgacagatgattttcttctatccctgcttgtatttccttgttggccaaggaacttctctagaggggttctagcttgggcttctgcccttttgctaataataataatgaagaaaaaaataccaaattttggatttaggccatctaaataacaaacttcttatagtataagctcacgattatttactgcttttaatgggaacaatttcacactaataatgtgaccagtaaaaaaataattaaaaacttatttttaaatgtaataaaataaaaagttataaattttaattaaaattaacaattaaaatatgatatatatatatatatatatatatatatatatatatatatatatatataattacaatgtttagattgtaaaagcttttacaatcattgtgctaatatttgttttttttaaattaaattcataatttaaatatgtttttagtctttataaatatagttaaattttattttatttttcaaacaatttttttgttgatttttatctttattgatttgaattttttaaaattattttgagctaatcttcaagacctaaattcctcgtataatggatgcttccaaatgatcatccataaggctcgagtgacaaaacctgacacaaactaattgaacaatgaaataagaaggcacaaaatatacataaaagtgataaagatacaatcagcaaaacagaggatgttttgcatgacattagacgtcctgtgagtaggtctaatactatgaggataaaacaaacttcgcaataactacaaagatcaaagagtataagtcagattgtatcagaggcaacacaaaatttagtcaatcttctctaagttgataacgattaattgagcccaactttatgataacaatttgaaaagtttatatatatagttgtataattagtggagtattattagtgaaatgatgagtaataagaacaatgccagtgacactcagtattaggaagagaatgccagataaaatatcattagtaattttttaagtaataattaagtcacttattttttttatttaattctgaaagattaagttctaacactttttgtgtttttaatcattccttaaaaaataaaacttctcaagtcattatgatgactagtgaaaatatattatatgtgtggcgagtgggaagttattatgaaaagaatttattgtggtgaaaacttacggggtgtttggtttgattgttttctgttttcattttcactgaaaatagaaaacagtgatgaaaatgtgtttggttgaatttctaaaaatatttttagtgaaaatgaaaacaagaaacaaccagaaaatgaaaacaataaattctcattttcagtgttttaagttgagaacagaaatctcattttgggtaaaatgaaattgcggtgacaatgaatgtaattttaagcaaatctaaaaatacaaaaagacaagaaatcaatatatcataaattttcaatatttttatttcatgaaaacagaaaataagaagtcaaaccaaacatgtttttaaaattttaatcttttgaaaatgaaaacagttttcagaaaataaaaatgcaaaccaaacacacccttaattattctatttcaatgggtcgctaattgcttatggattagtttgaaataggaacattttgtacaataataaggtggggaatttgaagattagttaaatttgactgtgtttttagtttgagagcttcgtttttatgttagagttaagaagtttataattttagttctactaacaagttgttattaaatctaatcagtataaataagttgataacacatattgattgagtttatgagagaagatatgagttcaatcctcacataatacatttaggtagctaacaataaattctaaacgtgactaaattcttaattataaattaatcttataatcagttcaaaaaatcaaaactaatagaaatatttttgatcccacccggaattcaaagatctcgcgatggttaaaataaaagttattataaagtcatgcttctcttaataaattttgttccattaacaagttgcacttaggactatgttctttttttcttctacttctttttaaaatgatcatacgaattcttacatcatatatatgttgcacgtgaatcagagatagaaaaataacaagtgcgaaaggtaatgtgaaagtaacaaataaggtgatgggtataattttaaggtattttgtatcttgtgattttgtatgtataattttattgattgaagtgtctttattcacacatcaaagcttaataattaatgatataattttgtcgatcaagcgtttaacaattactaatacttaacataagagacttttcttacaagctttccaggaacttcaacctaactataatcccttggtaagttcttgcgattaggtgccatagttatcttgacgagtatgtcaagtttcttgatggaatgtggttggacctcaatctgtcctcaagtgggccttccaagagcttgtctataacatggatccaaaccagaagaaaaacctttataataaataaaaccaaaaaaatgttatatttatattcaagtttaattttaattatatataatatttttagaattcaactagtctaatatgaaagaataccttttagaggatagaattctattataattattgattgaaaagtcaattagaaaataagagcatgtataacaaatttttaacttactataatccgaagtgtactttattttctttgattttaaaattacaaattttcaaactttcaaatcttcatttttctacttaatggttataatcacactttattttctacatacaacttattattttaaacgaattagctcaaaatttttatttgttaaaacaattttttattatttaaaaagtctgttagaaaatagtaaataacctgatttttatttttcaaaataaacgaaaccaatgcacataatgtgcatgtttagttgatatttttttaatattgatagacaatgatcattttataaaataattaaattaaactatacaaatacacaacaaagtatcacattatatatttttcaaatttgtgttatatcttcatttaaaaaaacactattctttttattaaaaaacataaaaatgaacattttattttagatacattactattagaattactggtcaaaagacacattattagaatattataatttgctcatgagttattttcaacttcttctgttaagatctatcgttctctatcgatacaaaaaaaatataatttgctaatatcacaattataatatagtttatagtttaatgtttatggagtgataatataaaaataattttatatttttatttaattataaattattatttaaattattttaaaagttaataaatttattatagtggattataattattttcctgtgtaaaacattttatatacataaactatttttcttctcattattaatactacttttgtttttcaaaaacggagtaaagaaagtaagcaaccagtggcagtgtgtgttgtgttatcggagtggtttttttgaagaaaaagaaaataaaaaaatagcgctgccgctgctgaattcctttcgaacttttcactttggtctctcttgtgactcaaacaaaaattcaaatctctctgatctaatccaacacttcacatttcctcactcttcaacacatgcatcttctccacaagcgataggttagtttctcaagagacaacaatgttgcacgagcttctgctagcgttgttgggctacaccggcgacttaatcatcgaccgccgggaccacctcaccgccgacacccctatctcctacgaatgcactttcaagctcgcccccgacatttcttttatcgacccaagcgacaggttctcgctgtaaccttcaattttttttttctataccccaatattcaattcgtttattttgtggggtatttttataatgggcacgttgaaaattgaaattttcgaatgggttgtgttgttgggtgcagggaacttattgagaggatcatcgtgttggggttttattatagggagatggagcggttttcaggaaagtgcagggatttaagttggataaggtctgcaaatgcgaaccctttggagaaaaaggagaagggaagtgtttatcgtagggcacttgccaatggcattgttgaaatactctcagtttataggtctgcggttctgcatattgagcagaagttgttgtctgaaaacatgcctatcttggccacagttactcagggccttaacaaggtaattttttctgttcccaccttttttttgtgtgtgtgtgtgtgtgtgtattttgatattggctttgttttttacttgctttccagtttctttgccttttgcctcctctgtatgagctcatcctagagattgagcatgatgatattcgtggaggtcagcttcttaatcttctacataagagatgccactgtggagtgcctgaattacagacttgcatgcaaaggtatgcagttcttttcacgtgtagtattcttggtaatgttaagatgcaggttgtgtcatttccaactatgtgatgatatgcctctaatgctgttgtgttaggctagtagttagtaaacatttgtggttttaacttttaagtcctgaatgttttagtgctgtttgtcactacaagtctttagtgtagtaaaaaattataggtgggaagaaaaaatatcgaagactatcttgttgtgttggtttgcaggttaatgatggatttctttttggtactgatttgtttattctggtccttaaaacattgcatcagtcttcatattactctcctggttaattcttattatcttttttcggttattcttgtccaaagcttaggcttctttggcatggacaccaggtcatgtataaccagcttgcatcctggatagtttatgggattcttcaagaccagtatggagagtttttcattaggaggtaactcagtattaatttttagtgtgtatgttgttgatatgcatgtttttgtgtctgaaatcaattataggggtagactgatgcggtggggttgtattgcaagaatgctgattagataatatacactctttcatttattatcccaatgttccaaactttttgaagggctgaagacctttgttgaaaatatttatttccacaattgatgtatcatactattaaatttgatatacagaattattattgtcaattactgtcataagttttcaaaacaattgtagcccctgctttgtttcaatagtttctattatatgctgttgtcaccatgattttccaatgactaaatattaacaatacttatttgcttttatatgttagaattatgaaattatctaatattatattgatcatatcttataatatcttaggttgccctttaggattagtttccctattttctccctatattttaagattggttaccatatttcacaatctcatgatttgtgtcctgctagttaggattatgattgtaagggttggtactctaggttttatgaccatatcatcacattgtaatacatcatatcatatcaggttagtatcaatttcatagtatttttgtttcttttctttctattccgtgtctctatacttaaaactccataatttcaacattatctattatgtgtatacttaagagaatcaattaccaaaacaatgaaaagaaaggttttatctcctccaatctctcccctccacactagaaaaactatgtgctaaaatgtatgacatgtttggtacatgaaaattaatttatctggatattagttcatcctcttcacttctttcaaactttgtgattgtttggttgcattgataatttctggtttcttaagttttgagatcttttatttgcaattgctttgtaattatatacttgacctgattcatttgctttttaggcaagaagatagagatgtagaaaatagctcatctcatccggacatctctgaaaagttggcatgcatgtcaactgatgatgcatctttgactgattggcacttgggctttcacatttctttggtaattgccctcgttattggctagttctggacatgtcatgagactgagctgatttcctttcagtgtgtttgtttcaaggtttaaaatttattgctgagaatgtgaactttggaatgcaatattcccatgattgttatgggccataaaaaattattgctaggtatttttcgggcctgggaaagtagtaataccttgttttacttaattcttgttcctatgctagggttgggaaagttatactcataggaatacaaaaagttattttctatcccaattataacttccttttctacttactttctattctaatcattttgaattttaaaagatattcattggaatactaaaatctaaccaaacattttttaattgactcagaaataacatttctggttatggtagtcctgggaatgtcattccttggaatgcagtattataccttgaaacagacgtcatctttttgatgaatatagttttggctcttagtgtttgtggctctcttttttgtatcaatggaattccgtgtctcattttttaatgaatgggattttgtccagtttaatacatggagttcttattgtcctttactttagattgacagggcacctggtgtttatgtatacaatttttattgttaacacattttgttttgcaggatatgctgcctgaatatatacctatgcgtgtcgctgaatcaattctttttgctggcaaagctgttcaggttctacgaaatccaagtccttccttccagtctggggatgctgtgcatcctcaaatgcctaaaagctttcagaaaatacatggattagcagggcgttttcattttcagagggaacctgcaattcatacgggaatgggagaagatttgcttccacaatctgaggcagataagattgaagcaatgcttctgaacctaaaggttttcatgttgttggattgttggcagccttttatgtggtttacttttatggttctaagttctaactaactgaagaataagtctttctttactattaacatttccagttagtttttaggcaaactcattattaactttccacaggaatcatctgaatttcataaaagatcatttgaatgtgctgtggactctgttcaggctgttgcagctagtcatctctggcaggtgcttaacataatctcctggttcatgtatttattagtttttagagcatttatgttcagaaacttcagtttctattccctccatgtctgcagcttgtggttgtacgtgctgacttgaatggccacctgaaggccttaaaagactattttcttttggcaaaaggagatttcttccaggtaaatcttgaaatgctatctataccaacattttgactggcaacgagtatctgtcaacttgcacatttttttctatttgtgttaaagaaaagactgtttattatctttaaagcttggcatttgtttgaaatggaagtgacagaagatgaacagttggggttggggcatgggggtgatatgaccaagactcgacaaataacaccctgcatctgatgggtgccctttcctgtttaagccattggacttgggtcattgggttgagctcgacccacagactcaacatatacccttgtgactctttgtgcatatcagggggaataggagttttgaacttttgataactatccacccatcaaatagtgatttcaatgatatgttttctccttttctgcatgtgtttcttttaacccttgaaagtgattatattggttttatcataatccttgtgtgtttgtgtctatggccatatcatatgacattacttgtaatcgatctatatgtagtgaaatttatggtggattactgattattttgatagtagcttgagtaatttgtaattgattataaattatgttagaagagtttctctctgtcattcactcattcttagatttccaacatctacattgttcgttattttggagtgatctatttgcgaatggtaaaaaatattctttgaatctcctatgttgcaaattcatttaaactttaaactacaaaatcaacattgggcagtgccttgtctatatccaatgccttggatatgcatcagttgctgaggttcatacttcagtttatcttgtaattttaatgaaattatgctgacatctttggtttactcattattttctgtgcaagtgtttccttgaggaaagtcgtcagttaatgcgattgccaccacgtcagtcgacagctgaagctgatcttatggtcccatttcagctggtttgtttaccttatgatttgtttttttggcttaatgccattcaccatttagttacatcagcatgttcatgtttttaaatgcattaacaaagcttaattgcaattccattgaaatgcaggctgcattaaaaactattggtgaagaagacaaatatttctctaaagtgtccttgcggttagcatccatattcattatttttccttccatttttgctagcttcatgttgagttgtgatgagcactatgtgctaaaatgtcctctttatcttctaggatgccatcttttggaatcacagttaaaccttccctattagatttaccaaagccaacctcttctgtagatggtagctctggtgcttcactttcaaatgctttgtcagaaatgtcagtagatggttgggatggtattgctcttgagtattctgttgattggcctttgcatttgttctttactcaagaagtcctctctaagtaagtttccactgctaatgtcctgtggccaagggtttattgacttattcttttctcttgctattattttagattcactagatctaactggaaaacctttatggtataaaacttcttaaaaagtgtcatggcatcataaaccaagtgtgcaagatgtacaactgttacattagtttaagagatatatattatttatgtataggggatatatcctgtgaaaccactggtttgcttttattatgaacaaatgtggaccctggataatctggcttaaatggtcaagattgaaagagtgtttgaaaaagtcacatgactgtgttttattgttgaccatgtattattcaataatcacttaatcaggatttgttccctccctctcgtaccaaaacaatgcttcggtattgtggtcttgtttgaataaacttctttatataagcagttagcacttatagaagaagaaaataaaaaaacaaaatgaattaaacttcctttatattttaaaatacgctgatgcacatcacctattagagaagttagattcacgagagagcttttattaaagttgaagtccataagttgattttacttatggtagaagtttcatcaattttacctttgtattttcttttcaaagtgcttatggagaagtttatccaaatatggcctttatatcttaataaacttgatatgttatttctaggtcaataacttttctgcacaaataacactttcaacaggtacctaagaatattccaatacttactacggctcaaacgaacacaaatggagttggagaaattatgggcatctgtaatgcaccaatatcatagtgattttcccaaacaccgaaatgatcaagaaaagtgctcagaagcacagcagaaacgacagcggtttcgaccgatgtggcgtgtgagagagcatatggcattcttggtcagaaatctccaattttatattcaggttgtcattcatatcttgtctttgattttaaatttattaaattgctactataaattatcatcatcagtattattagcaaaaaaaatttaatgagtttcgtttgagcaaaagcacaatgatggtatcctaattacaattttttggtgtgtactgtacctttttatgacgaataaaatgtctgcttaacatttaaaattgtgctttcctttgcaggttgatgtgatagagtctcaatggaatattttgcaatctcatattcaagagtctcatgattttacagaacttgtgggctttcatcaagagtaataatttctctattgcatgtttagtttttacattttatagtggtgtaaaattgtttttcttgccgaactatttcacatgcttactatcaaaaccagcatgatcatatttatccaaattaaattcagctcttagtgaccattgactcagtaggccaacttttatccaattgctgtcacctacagggatcatattttacttttatggtcaaagataacttagtttttcactttgctgttattgagtatcaacagtaacagtagatcagaaaacagcttcctttaccctgaactaacagtttaatgagaaatagggtagcatttgtcaggtgccacaatgtttaaactgttattgctttgtgaagtataaactagttagtgtggtttgttgtattccttctggtggctattttacctaaatattgctaattactacatcatactatttgactttaatgtctcctacaggtatctgtcagccttgatttcacaaactttcttggacattggttctgtatcgaggatactggatagtatcatgaagctttgcctgcaattttgctggaatattgagaaccaagataactgttctaatacttctgaactggagcatatagctgaggtgatatgcattgctggttttgtttgccaaataaccgtacatgaataagtatctcaataaagccattattgtcctcagacatcttcatacattaaacttagcaggctcaattatctgaacatttttaattaagagggaaaaaactatactaatttatgatcatcttatacaatctgtgtcatttgcattcatgctgtaattttatgatatattatggatagcagaaaaatactctgctttctccatataattcattataacttaataatcaatgatgtgggtaaggttatgatgataaatctgtgaattctgtaattgtatctcttagatctaccataagacaggctaaattgggttcgaggaacttcagaattgacttctaaacaataaggtagtagtcaggaaaggtacaatatagttgctactttatggttctgtttcccacaagcctccttttttagtggaagctggcagaaattatatgggaatatatgcttgagcccttctatttcccttcaaatatctgaaatactaccttctttgactcaatgaacaagaaatgataaattactatttatgtcatttattctcaaatgtatactgccaaaagttgagctttctctcttcactttagatgtatttgcagaaatttactctaaccggggctaaattgctggggcagatttgtatttaaatgcaatctgtgtgtgtaatgaataaaggcacatccatttttcctccgtgtctcacctgattgcacctattcaaattacttgttacatttctatattttagatttagataacatctccatcctttactgaaatctattgttttgactattatgttttctaacctaacatctataggaattcaacaagaaatcaaattccttgtacaccatactgcgcagcagcaggcttgctggaagtcagcgagcaccctttttgagacgttttctcttgcggttaaatctgaattccttctttgaggtaaaacaatcagatagataattagtctcactgtttaactttagaacaatgtttcttattgtttgttattttgtcccttaacaggcaactgcaaggggggttctgaatgttgttaggccacgccctacacttcctgtgttaaactaacaatagtttcaatatcattccaccaccactccaaagtttctcacttggggtatttggcatgtgagcttcagtttagtgacgttgctatctattcaccattgctgtttgaccatcctgcaactgtcctttgaaaatcagttgcacattccactttctattttgatcctagctgggtttttttttttttttttataaatgtaagcaccggtcagtttgaaaagcggttcttgatttagctatttggtggcaggtagatggccgttgccgtctttcccactttgttgtcttttgtacatgtgagcagtgatctttgtgtatagtgcaatttgtttctaacattattattactatttactaaatgtagttcttcccacgtggttagattgtttgtggaaacgctctcccacccaaaacacgtttatattctgaatttggcctattgccattatatcctctaactctgctttatatcaggtgatgataccaatggaatatgatagaataagccatttattctgtgttgctcttatttcaacaggacaaacaaaacaaaaaattctgagcatctaccgtataactatattttcaaatttcaagacaagctaaaaccttttctctctctctctctctctagtgtggaatgttctatatgactaatcagacaacaaacgcagtctacacttacgtcaccagtgatccaaacatgcatgtctgcgactctattctattctagcacgcataagcatacgtgataaatgaccacgatcactagcgtctttgttgaaaattggaatgctcgatattataataataataataatgcgtaacaaagggagaaatgatatgggtaatagtaaagcaaaagtaatggcaacaagggtcattgttaatgttgtcgtagcagcacattctccttcttttgcatatccgatgctttgcaagcaatcttggtgtcagcatcgtcacttgagtcatcctggaacaaccctgcatattcaaaataagtacttcacctcacttacgaagaactagttggagccgggaaatatttttcgataaaattcacggggaaatttataatgtttggggatagaaatgaaggaatatctacactatccggattgaatcagatacaatttgaaggattttgtagattcattgatcgaagcttaatagaaggactttttaagtgtccaaaaattgaggatacagatcaagaaattgaatttcagctaagtttcactgcagaatacagattcacaaaatgttgggaagttttgctcgtactaaatagcagccctaaaaaataaaaccgaaaaacaattaagaatgtaaatccatgtttattggtgagaaggaaattcatggttaattttaaactttttatgcaataccatgtttatttggtgcgaaggtcacctttaagaaaataaaactcatcgcttgtgtataaaattgataaatccttatataattgaagattattcaattttgtaataattacattaaaattttaatcacatttcaagtaaattctaagtgatttagagttcaatataccaaaacaaaactatattccatttttttataaaaaaaaactaacgtgttcgtttgcttagcattttcctaagatgacaattcatcatgacagcagtaaagcacccattattagtaaaactatttctttcaaatttatcttagtcacagtctactcttttatagtaacgaagaaatctttcatataactaatgtgtagtactaaaatttctttcaacttccatcaaagttgttagtattttttttattcgtatcaaaattgttagtataattcttctataaccacttttattcgtaactgaaataaaaatcagagaattcatcttggtattattaaaaatatagataccgtagtaattacatccatttttaaatttcaaatttctcccacaatatcgcgttattgaggggagagtcagagccatgaactttggactcagatctactcaaaagatgcccgatgcagacgaaatgctactctaagaataccaacacttgccttcgagaaaataatgtaaagcttccatattgaaataatgtatctgtcagttacaacagaacttcagaaggggaaccaaatcttgttcatccagcaccctactgccatgactgcgtagggaaccaacccataccctgaaacaaacttccttatgcccactagaacttctagtttaagcaaatgcaccagcacatgcagtggctggagcagcttccagctgtttctttgcagtactgtatttttttgttataaacctggacaaatcaacaagaaataaaattcaaaaattatactatatgtacccgtttattgccagaaacagtatccataaataatgttttgccaacaaacaagtgaaacaccaatatttactctgtatgataacaattaacaaagcagataacagaaggaagaaaaatcatactatgctgtaatctgaagcaaaacttgatgatcattattggtcaaataggaaacttgattcagaatgatgtgttccatgatttcaataatcacaaggccacccttacatttctaggttaggggaatgagatacttctaattttaaacttagacaagtacaccattcaaaaactgcacgtgaaagccaaatagttgatatcaaggttctaaattgcagtcacaattatgaatccatcatgatccttgatatagtagaaaattgcagatgaatgcagttatggcagccacaaatgcaatggcaaagaccctaaaaaccttggcattgtggttgcaattgcagtcatggaaatgtttttttaaaatcttggtactacagtgaacatatagaaaaagaagggcattcatttggaatttaccacattttgaggaacaatcacaacttttatgttttagatttgagttgtttgcaactttcctgtatacactaaaaggttatcaatagctgataggcagaacatgtcagaaggctaaaattccaccatataaacacgccattgcctatggcgccgcaataatgggcctctccaaaaattgcctatggcagaatggtggacaatgccacattatagcactatgccattatggtggcgctataatggttatttaaaaacatttggtactaacgtcatccttttgaaaagaataagagagcaatatcataagcatagttatcaatctcggatagtggtgtaccacagctaactatgaaaatgctatagcgggatgactgctattttaaatattataatacaaactaaataatttatactgcacatataaatactcaaaaagcaagaaaaatgaccacatacacaatcaccatcgttttaaagaaatttagaagttataatacacacatacacaatcaccatcaatctatatgaccaataagaacatcgtaatgaagtcaaaaaatgaatgatagacgacgaaattaatacaaaaagcacataacaaattagatagaagacttagcagaatgtgagctgggaagtctaaagtaagggtggaatacaagataaaaatggtcctataatgtgtgagggaataaagataaaaatagagttaactattcatgggatatttacctaaaaaaccccaaacaatgatgaaaattacgggtaaaaatggattaccgaaccctatgtcatggtggcagctgcaatatatatatatatatatatacatggcctctattgaaatgtgctccagtatttgaatcccatagtgcacaaggctgctccacttcgctatcccactatagtacgctattgactatgattataagttcttaaatagaaaagttacatatttttgcaataggaaaagaaaaacaattgcataattctcgagaacagagacagagttacttaaaactaccagtttcatcttaaacccctaactttctgttttgggggggggggggggggggggattccccaagtggtgcaccattgccatttccatatatctcatgcaaagaaaaatgtacactgaagtttcaagcaaagccaaaagatgtgcacaaaaaatagttacctaaagaagtccctccatagcaactcaaacatcaaccaatttgttccagttctggacgagccattaccaccatcattccggttggacgaagcagaaatgactctgtcagcaatacaattcaccagtgagtatccaccctattcataacaaaaacaataatacccttaaacagaacaacacaaaagaccacagacctgccggcagtcttcttcagttcttcatacattgtgcgaggggaaaggcatcccattgccaaccacggagaaatcttgcaggagaagttggcaccatatatactctgtgttccatccttaaaccccttgtgtggctgagctgcacactcagctgcaaattttttaagcttctgcagtgcctcagtctcccctcctaccatagaagcattagcaacgcactttccattctgcacaatgataacctacataaaccattgatgctaacacaagaatgacatagaaacaagttaaaaataaaagcaaaatataaaacctgtgacattgttgcagatggattaaggcctaggtccattaaagaaggaatctccccaggctcaacatcaccgcgagaaggcattcccttaagctgatctaatgcctcaattgtcttccttacctccaatttctgaaccctatccctaaaccctccgtaattggaaggcatgtcctccaattgaaaaggcaaatcgtccacgtgatacaacgtgcttccccagaagtacttcacctccacattctcctccttcatggccgcctccaccctctcctccgccttcgcctcgtcgtgcgagacctctcggtgcgcgtacacggcgtcggccccgacggccttggcgagctccaccagcaccgcctcgggcttcccaacgcgaacgacgagatcggagccgcgagcctggaggttacggcggaggtcggagacagagtcgatgaggaaggcggcgcggtaggggccggtcttgtcgaagccggaggccgacttaccgtagtcggcggggtcgaagcagtagacggggaggacggagagggactcgttgttggcggcggtgaggcactcgttgtcgaggaggcggaggtcgttgcggaaccagactactgcggcgcggcggagggcggcggcgttggaggggtcgcgggggcggtgggggccgagggagagaggggcgtgaaggggggtggaggagatggtggatttgaaggaggttttggaaggagtggagagagaaaggtgtgtgagggatgaggcctgggttgggactttgagcttggttggctgaggggtggtgggttggaagaagggcaaaactctggggagagagagggagactgaggccactgccaatgctgcttcatgcttctctgcttccattcctaagctaagctctttctctctcactctctctgtatgtggcttcgatggattattaccattatcgtccctttttatttatattttttttagtgacattacacattacctatatagattaatttttaaaattcttattttaagtttcccccttgttaaatgattattatttttttcttctaaaattacgaaagtagtactaaaatataaactttttaataattttagacgctgaattaatctcgtaaactaattttgttaacagttcatctcatctacctttgcattgacgtgcgccggccacctacacccccacctaacctttttttttcctgcctgcatttttacttttttgacgttgggttcatgcactacattacacaatgatatttctaatatccaatttctccttatcattcgtgttttattttccgaaaatgtttgtagtacaacctttttttaggtgtatggatgagaaaaagagaattaaaataaaaaataataaataaataaataaatgtaatgaatgatgtgataaaatatataaaaaaagattaattaaatttttagtgtctattttttttaatttgatttttaatctttgaatttttatttaatcagttaaggtgttttaagttttttttcattaattttagtctctaaatttttttattggttaaggtcctttaatatttttttattaaaatttttattctttaaacttttatttgactaattaagatctctaaacttttaaattttttaatttttaatccctaacaaaagtttaaatttattatttttatttatttaatgagattttaaggactaaaacagaatttttaaaaaatttaagaattaaaaaccttaatgaaaaaagtaaaataacttttaactagtaaaacaaaaatttaggaattaaaaatcttaaaaaaattaaaagacgttcacgagtcaaaaaaatttaagaactaaaccaaattttaaaaaaatttagtaactaaaaaaagcttagaaaccttgactagtaaaaaaaaaatttaagaactaaaaatcaaattttgacaaaagatagttctgacatttcaggatgtttctaattctgagcaaattgtttcaggagaagaaaactttgtgctaagtcaagccaactttcactacataaaggtgggagacctacctgtggggttttctgaatgaatgtaaaaaatatcaacagtgtccctattttcttcattaacatgctttatatcagagaaatccaccttctcatgggcttcatgttgaaaataaggagtctcttccggtacccaatcctctggcctctcatctcttacactttaaataaaatacaaggcatcaaaattaagattcaattggaccatgaaatttcaatcttttaaaaagaagcaagtagaagcacatacataggcagagaaatatatggccaacgtttgtcttgagcataagcatgagtcaatagttaatccatattgcagtacagtcaacagtgcctcccagagagtcacagcgtttggagtccataccgacattcagtttcttgatgagtattccacaagaagaataagaacggttaagaattaaacaagcaaagtgataacaagaattaatacagttaaacaagatgtgttgttttgtaaatacttttgtttttaaacttatctaaccttaattatgagtaaaagagttatagttgttctgacttgctgattgggacacaagactgtacaggatattcagtgctaatttaggagatgcaaatgcacatacagatattggtcatgaaaacctaagaaccgcatctaacattcttggaagtgagagacagtctcagaagttttctcactatctttccctaaatttttaggtcacctacagtttctaaggcaagaagtcttctggtgagaaatataggcccatattagagttcttacacaaccagaaatgagttaatgaaaataagaaggaaacaaacaatacatatttaagaaggtttaaacagaagaatgtgggtatattacctccaaaattatgtataaccaaatgtaagcccaaaatggccaaaacagctccaccagccatactcctatatcagcaatcttcttcagctctcctgcttttggaactactacacaaacagcgtgaatggggaacaggtcaaatgctgcagaaccaacaagtgttccgggtcccaaacctgaatattcagcagttatagttattatattgcttaacaatctaatgctcctcaacaattccagaaagaattgaagatcataataaaacaaaaactgcagcatcaaatattattcagaaggaagaaagtcacggcaagcactcaagtctctcattagaataactatttgcacttgccagcattaaaaaccaaatttgaataatcaattagtcagcaacaactttgttgtagtaaaacctgtttccaatcacatcaaagatagaaaagctggaggaacaaattagtgatacaattgtcattctttatccttataaagttataataataccagaaaaagcaagatgttaaattgtgtttctagggactagaaagcttgggacaatttttcatgaacacaagtcagtgttgaaagcacatctcactttttttcattgcatttgaattttttaaataaaagtcattttatttgaatattccttttataacctttgtacctctgatatctttctattccactcgatacatagagcacccatgctgtctaacataagctataaatatcttctaacataaagtgtatagatgaatttatgcatacaagcatgtatatcgcaaattacatctatccctaggtttctacttctggtttcagaggtttaacctacgtattcatccaattcagtgaccttcatgaattgctaaatcatttcattttattcttgacttatctcacgtctttgaaaataaggtatttaggaagtttcaatgtcctgtaaaagattaaaacctttttgtttcattttagaattttagaaggaaaatatgaaggtaaaattttcatttataataaatattttctaattttatgattttaaaaataaaataagatgataagttaacataaatttaatattctatttttttgtttatttctaaccaattatataacttttttaatttaaaaataataaaaaaatggttccttctttttcttttcaaaacctcattctcaattgctgacagttgacgatgaatgagaaccgatttggatgattgtgaaaagtggacaatatagatgaatgagagaaactttcattttgaaaataaacaatataaaaacaaacaaacaaataataataaactcttatctccttatgtgagatcggttacataaatcacataatatcatttaacataattaaagatcaaaattcaaaaatattattaagcctaagatcttccttcataatttccttcaaaatactgttcgatttcccttttctcctttttattagactcaaaatcatgtcatctagccttctaactaacatttattttggccttctttgtgcatgccaataatgtcttaatggattttttttgtcatttttttccttctacaccaattttctcacacataacatcattcagaattttatcttttattgtatgactacacatttatgttaacattctcatttatgttactctcacttttctctcatgttattcctttaaagtccaaccttcattaccacatagtatagtcataatataatggaatctataattgtacaacaaaacttgtctttggatttggtagatactttgcgataacaaataatctttaaacaatctaaaaacaaaaataattaaaaagaaacatgtttttaaaggcttaaatgatattatagtccttatattttgtttgtattggttccttcattttaaaattgagacatttgatcctcttattttagaaaaaaaaaagcaatttttgatcaaattctcaattttatctacattttatttcttttcctttggttcaattgaatcttaaacctaacatgttcatttaagatatcatcaagaaataatttaattaattacaaaataagaaataaaacatacgcaaaattaaaaaccaaagttgtagacgttttaaaatacgaaaaccaaaattatgaattttctaaaatatgaggaccaaatattttaaaataggggtaccaaaataattttttaaaatatgatgatcaaatgtcttaattttaaaatagagggatcaaaattacagattatgtaaaatagaggaaacaaaattgcatttaagccttttctaaaagataaaagtttgaaaacaataattatttcctaaaaatgaaaatagagaatgaagattattttcacaaatttaacagacccaaactttttatttctaataaataattttttaagtaaaggaaataaaatgatatattaacataaatgccttaatcatttattcattttgtcattaatcattgttattctcttcaaatccacaggaagatgcccttacaacaactgcctttaactgttaaacttgccaactcaaagttagaatctgcttgtccaactgtcaacttcatttttaccacccgctttgttagaattaatttgctagattttcggtagaatttgaagtgatagaatcccaaattataacaaaatttatgctggaagtttccattatatttaccagtagtctttgtaggagcaaagcccattcttaaaatggtgaaaccggttgcaatctctaacaataatctcccaattaaattccctagatatcatcttgattgcaacatgacaatcgctacatatcctcaagttcttcacaatccgaattgtggtacccgggcttgtcctgaggaagcaatatgcaattgccagtttttcactatgaagggacaatgcaaactcctttccttcctcatccaaatcaagtaatacctccccagtgttacgttcataaccatgcttttccaacctcttcacaatctcatcaagcattatgcatacatacatgcatacatacatatatatatatatatatatatatatatatatatatatatatcccgcgaaaaactcaccaataacgccatctacctcaaccaaactacaccctggaagtttcttgattccccggacctccatctctcaaatgcctcacttccctccaccgtcccagcttagcatacacgttagaaagaagcacgtaggcactactatttgcagggtccaactcaagaagctttgttatcgctacctcacaagtttcaacgtccccatgcatcctagcccactaagcagagctccccatatcatcacatcaggttccacaggcattgatttcaccacactccaagcatcctcaatacgacctgctctgctgtataagtccactatgcaaccataatgttgaatggtaggactaacaccatactctttcatcctcttcttgaaatattcattcccttcactaaccaaccctccatgcacacaagcacaaagaacacccacgaacgtcacagcatttggtctcaccccatcatttaccatcctcgcaaacagttcaaggcattcctctgagagtccatgcatagcaaaagcagtaatcatggcactccaggccatcacatccttttcgggaccaaagatattccacatttggcatacatgtcaatcaaagaagtccccaacacaacatcaattttcatcccagttttgtcaatgtaagcatgaacccacttcccatgctcaagtgcacctaaccgcgcacaactcattaggttggactttacttccttccaacgtctgcaaactgcgaaacaaagaaagcgctgccttgtactcgccacagctcgcataaccatgaatcatgcagctccacgatatgacgttcctatgaggcatttgatcgaacagtttccgcgcaatgtgaatcatgcccgctttggcatttgcgtggatgatggcgttccaagagggtaagtcgggctgagtaatttcgtcgaacacttggcgggcaaaggtgagggtgccacgtgaagaatacatgtttatgagagaggtttgaacaaaagggtcgttggcaagaccaaggaggaagatttgagcgtgaagctggcgacctggatgaggggtgttgatggattgaagaaggaatgggaaggtatgaagatcgggaagcacggcatggtggcgcatgcgaaggtagagagacagtgctggcggaaacgatttcgactctgtttctggtgttggctcgaatgaggttgttccacacgaacgattcgatgttggggtaggaaagataaagacttgggtgcgtgtacgatatcaccttcgcggaagcacgcattggtggtgactgctaaagccaatcatgaaactcccgatgttcaaggtcgcaggactatgaagtgattgagtaggcttaatggtaaaaaataaatgacaaataaaattttcttatttaatttgtaagaacaaaaaggaaaataaaactaatttattattttagttttataaaattaataattttaaggtgatcaagaaaacaaaagagtgaagcttgttgtttatttaaaaaattaagacatagttttaagtctcccctaaataaattgagattcaaattcttataggaaaaaatatttatatttaaagattttattttaaggaatcattttatatttttgagaatcacatccataaaaatattttaactgagaatgttattctcttgtatatataaaaatacgtttggttaacttttaacatttctaggagtattttttaagttttaaaataatgaatgaagaatagtcttacgttctcatgggaatgtaacatctccaccctaagagcatgagaataaaacctgtctaaacatgaaaatgcaactttgaaggaacaaaaatatttgaaaacatttttctgataacattctaataaacattctcacctttatattcttgaaaatgcatgatgatatcaaaaaacaaaggtctcctaatataagtttggccgctaagaagggaagagtaattgaaggaaaatttttagtatttaaggtgagttttacacctcttttcttcttagtgttcttccttgctggcttgataatacctgataaataaaataacaatgacatgaaatatttattagtttgtgtaaagagtatgtcaaaaactgtatttaaaagaatgtgtcgatcaatatgtttaaagcatttctctggtgtaaaacaacattcataccaccacttagcaacgtttagtttggattttttttcttaccaagtggatctcctttttagctgatgtaaaggattttcctttgcattgaagccagtattttgacttcaaaaaataaatggtcgatttatgttgtgatcattttatctcattcacacttaatcaccgattcccatctctctgaacccattccttcatctcaacatctcagtctctcaaaaattctttcctctcactgaatacgcctttgatatttcgtatttcctctcacggatatttccgaagaatcaactctagctctcaccgtcctactcttttccagcactaatccacctcaactgtccacgtattaatttatactttttgtgcttcctcgtccatgtactcggagcaaatacacacaagccaattctgccatgcctaataaagatgaatcgggcattgaatcctgcttagggtgttcatcatcacgtgaacagcaattttatgcccattggaggacaaactaaaaagaaacttctccaactgtaattgtaaatggtaaccaaattaaagatgcatgccgacataaagtagcatgtattggcatcagactttttatcaaacaatctctataaaatttcatatgaaggcataaaagttggtccaaataaaacacaggaatatttcaaccagtaacaagtcaaataaacaacacagataaaagagactccacagtaactaaacctaatagaaaatgcctcaagacacggaattagatcttcagtcttcctcttcaccctcgttctcagcaatgttgaagtatctcaactcatagacattccgctccttgttggatgcaatcacgcgaagccaatccctcacattgtgctttttcaagtacttcttggtcaaatatttcagatacctgagaaaggtgtaatacgcaaagaaaatcaaaatactagcaaaaagaatagtacagtagtacccacaggaaattgggctgaaaataaacaaatttaatttcatgtgagggtttaaacaaaaaaaatcacagaatagattactagggaaacagtgaggaatgttcgaacttttcctacgtaaattaaaagttaagagatactagttttctcatgcatgaatacatcctatgtcaagcccaacacggcaacccttatatgcattttccctaattctctatcacaatcatactattaacccttacggagagataagaaaaaactgaaggccatattttcataaaacaagcatgaatgaacatacatatacagctttagcaacaactagccatctcagataacataactaaagaacacctgatatacataatttctttcttaatttacctcaacaaacttataagcaatctgacaattcaaaacataagggctaaacatacatttcgaatcgtctactattaaaaaaatggaatcatattctgccagattaccacatttaatcttatacctatcagccaatccaatagtacaaaattattcacgaatatgttagcttaagttttcaaacagatttagcttaagttttcaaacagctttctatcatgctgatctcagtgtcagtaacagggtcctagatctattctccgaaatatctcagcctacagaaaaaataacatcaattaacgatgaataaccatacggaaaaggtaaatcaccctgattttgagaaatgctataatcgataataaaaaaaaaaatcccctcctatgagaaaaaaatggcagcatacaagaggagcatggtgaagagagtaccgtttagagaagttgctgtcggaggtgacggtgatcttgctcttgtccctggtgacggtaatggaatcgccgagtgcaccggccttgccgccgaccttaatcctctcctgaaggaacttctccagagaagcaatgtccataatcttatcctccaccggcttcgcgcaatcgatcacgaagctcgctcccttcttcttccccttcgctccgctcattttcgcgcctctccctttctccccttgcgatggtgatgagcactaggctagggtttttgtcttttaaaacgccaacaacacctgccgttttattataagccaggtccaacctacatgggccgagacccaattaaacaggcccaattgtgtaaaaaatgctccgatccctggccctgctccttcctctacagaaagaaaaatggaagaagacctggacggcgtcgttctgtgctcctccctcaccgtcgaggctatgattcgtttcggagcggtaacaacatcgcctattctaccttgcttgaatcgcaaaataatagacctaatgaaagaaactttaaattgttcttcagaccggtgcaatctggggcttgtgtgctgactcgtcaacaaggtaaatatggagactcgtaactatagtttctattatggttatgaatttctaattcgtaaccatccatttctctgtgcaggtcttacaggctctgctaaagcttcttttttgataaatgattagtttttcttttatacagcttgacacacaaagatatggtctaccaaccaaagatgcaatacattgatatttttcaattgaaatggctgtttctgtatgaactccatggcttgctggtttggcagtcacacatcatacattgctgcttttgcacgtcttttttgttctgggtctcacacattgcaccaaggcagcatgaccctctggttgcataaacattaccaggatacatgcagtacattttctttttttttaataaaaaggcttttcagatgctgtaaatgtccaagcacataaacagtcaggctttccacggcattgccctttgatataatatggaacaaatacacagttgctcgcccattatttgcaaatgtgtcaattttttatttgcatgcttgagaggctatctagacttttagaactcatttgtttcagtttttattttaatgaaaaatcatttttgaacatttgtaatttatttgttcaagtttttgaaaagaaatcagatttcttattattttgacttttgagtagcttttttttataaaaaaaactgtattttttaacttacttttgaaataaaaagtgctttttataattataactaaacaaactatagtttctactttctataaaatctttaaagagggtaaattacttttttataattcttaaaatcatttttaaactttttttaaacaaatgggtctttaattttgcttctatggattgtttcaatgcctcccctgtagtcagagtttaaatgcttctaatcatctttggaaagtgccaccagtggtgttagtgtggttacttcttgattgaacactgcatagcatcattgttctctccacggtgatcagtgacaggtcaatatagttactcggttatatatttctctgaggaaatttgaattcttgttctgcggctagattcctcttagcagacaacagacttcatatgatcaagtggttttgaccaaatgatgtgcttaatggaagataatattgcatatttgtatgaaatatgaatgtgctggaaccttatagatatattgtgtagttttgggagctagtttggcattgattctgaaaccaccatttttatttttgcataggcgtttgcatggttgcatatgttggcactaaacaactatgagtaacaatacaacatgaacatggttcaatgagttgctgaaaattacttttaaatttccccaacaggtcaatggtttgatcggggggctgtagcaggtgcagcagctgctgggacacgaagttggtcacaggtgatagggatagctggtttggtttctgttttctctgctgcagctgactattccagagcatcctaaaatacatattagaatcataaatataattttatcagcatgagtattaatttattacagcatacatctgtgtttagtgtaatcttaattttggttttatttgtagtttgtccacataattcttccttgtactctgtaatagaaaattcatgcagtttgaacaattcaataaatttgttatttaggtcgaaactaatgtctgcaaaaaaaatgaaaaaacccaaaagaaaagagtgatctcatatccctgtatttcacaatttttgctatctatttctatatacctgtatttctcaattctaggaattatttgactgagaaaggtttaatatattaacttttggtgttaacagtataaaagagttgtaaaaaaatatgtaaaagaattggtataaatagttaattacaaatacttcaatttcaaacagataatttaataaaattaaaacttttggaatgctttactattaatctaaaattgaagaacaacatcgtaactttatactaattttggaggaggaggaggaggatattaggatatatagaaagcttattattatatatataatatttaaaattaatattatatcatttatgttaataaataagaagtggatattaaaacagtgaatctatgtgacattccatttagcttgcaaccaggtaaaaagttggtttgattaaaaaaattactattctacaaataacttgcctgagatcgacccaacctaaaatagaataacacgtcatgagtctctctagtgagcaaaggtgcccaaattaatagctacgacattcaaatattattttggcattatacaatttttactgataaaagggataaaaatagatttgtcgacgacattgacagtgtgcatttgcgtaacatccacaaatgatgctagaaacgggatttgggaataacactttctacagatacaaaatggtatcttagtccacctaattcattttttatttgattttacactcaaaacagataattcttcaaatacaaaaaggtatgtccacctaattcattctatatttttacaatctgttactcaaaatagataaattcaacaaagcagaatcttaaacaaagaaaaaacagcatcaatctgttactcacaagatataaaaggcctgtggcctgtgtacgaaaacttcattgatgttttcaacatatcaactttcattaccatctcaactgcttatatacttctaagagaaaatctaaagattaacaggttttttttattagttcaataacacccaccaaaccatcgtcgaattatttggtcacctatcatggatacgaagttcaaatattatgaagtaattcctcccaacttgactctttcattcacggactcatagttctttttctttcgtgtgattgttttattaattgtgaaaattgtatcaaatgtaacattataggtatacacgaggaactcaaggggaatgcaactctttacctgcagatgggtgcctttgtcttctccgaaggccattattttcctttgccatggttcaattgccttttctcttcttcactctctctctccctctctctcctattaggcttgattttttaaccttacgtttttaattacttattacaggttatgccatggaatgtagtacattcatgagaggtaatacatattctttcacgatttactatttttctttctttaccatattttctcctctcttttttttacggttagttattgcttttcacttattatatattgcattattctacgtgttaaatgatggtatatcaataacaccaattaaactcttggtccaaggataaaacatctaaaactaaagctttagagccactgataacaaaatattttcttttaattttttgtaaaacaaaaaatgtcttgtatgataaaaaaaaatggcagatatgttgataatatagctcttacatttaaattaaaaaattctcttaaaatttattttaggtcttatttactgctggatcaatcctggtactcaccaaactgtcattgaactattttatcacctttattgttgatggattaaggaagattttaaaagatgaaacttaattatttaagttcacgaaagtagtttataatgttcctataaattcttctatatttttttttcaacaagcttaaggttaagcttatgaacaaataattttttggtaaataaattttaattaaatgagtgcttgattaatctatttatccaaacatgttttaaaaaattaagtttgtacatcaacttaagtgggttggtgctaaatatttaaagaatattttgtcgctcatagtgatcctatttacctatttagattgaaataattgcttccaagatattatagtctctcatttttaattaagaatctaatctcaagatacatataaaatcaaaataagatttaattttgttatatgattttatggggtatggaaggaattaaaaaatgcaattttttcattgtatggaatgtactttatccgaactcatgtataaatagtctaaactcatatataaatgaaaaaatgatcttatatatttgacttaaatataggtaaatctaactaattttatcatatttaatgttatcattcataaaatatctttcctttaattttaattttattttcaataatttttttattcatgatataagttctaatgaaagacattttagtaataattttattttttgcttgagatcaataagattaaatgatatcaattaactttattaattaatataaaattaattatttttgtttatatacgaatagagaatgaatatatatatataaagtacatgacattaatttcctgtgacaagtatattttttgtgattttagtacttataaattattagtagtgtcgcattgaatataatacatggtaaaaccttgtatgatttattgtgtgcttcatgcctttagcatgcggagaaaggttagccaatgctggatatgcagtgtttggagtcgactatgaaggacatggacgttctggaggtgttcgttgtctcataactaagtttgacaatgttgttaatgattgtgaagactttttcaagtcagtttgcggtagggtttgaatttcttgctatataagcaataatcatagtgttgaaacatttcaaaacttcttatgttgaattgcttcctcatttgggtattttagagctccaagattacaaggggaagcctaggttcttatacggggattcaatgggaggatcagtgtgcttactattgcataaaagggacccttcattttgggacggtactattcttgttgcacccatgtgtaaggtatgattttttttagagtatatgagcattcattcaaaaaaaatatttttcccaccatattgagcataacatggtttattgatggcttaggagatgtgtgacaaacttaacataaatatgttcaaatgtaaacagatatcggacaaattgatgaagccaattcccatagttataaacatgttaacaaaatttgaagatatcgtaccaaagtggaaaatagttcccacaaagaatatcattgactctgccttcaaagaccgtggcaaaagagaagcggtgaggtttaagtagtttttgatagaagcaactagcatataaatttcattttatgtttgatttaaaagaaacgtataaaacagaacaagacttgaggttaaaagtagttcattttatttcaactatacctaaagggtgtatttaaagagacaaatataattttcaattttattttctccacgtttcaaacagtaccttaatgtcctttttctatatcaatggaatttccaaacttaacaattattgaggctaattgagaaaggaaatataatcttatttctatagtgcaagagttacttattgtcttctgataatgattgtagataagaaataacaaattgatataccaagacaagcccaggctaaaaacagcaatggaaatgatgagaactagcatgagtcttgaagagagtctacatgaggtgattcatagattttttttttcttaaaaaaaacatatttgaagtcagtttatatatgccaccctttattttggattaaaaatcaaattacgccatttctagactcattctataaacttttagcaggttacaattccatttttagtgttacaaggagagaaagatacagtgacagacccagaaataagcatggcattatatgatcaagctagtagtgtagacaagacaatcaaattatatcgtggaatgtgtcacggcgtagcaactggggagagtgatgaaaacattgcaattgtgtttgcagacatcatagcttggttagacgagcgcgctagcaaggaaaaatttgattcctttatatcaaatgaaaatgacgatggcattatgaaatagacaacaaatgccaatgcctataattgacacaaaattcatttaacataaaatgcattgaagaaattttgattatttgcatggattcgattcattagtatagaattataaatccagtcaaatgattattatctattatggacatgtagctaatagctacaactcttttcaaaaattcattttattatgccctacttcatcctccttctagcttaaattgtttatgaaattaaagcaaaatatgtaaggtttcaaaatcaaatattttagcgcaatttttgtaacaacatataaacattgggagatccatagggccagactaatttttgtatgttgttgagaaagaaggaagaaaaatattatttcgatgaaagtgcaaatatatacatagagacttcgtaatatatcactattaaactactttgtttgattacatagtaattatagggataaataattatatgcttaaaaaatgtgttgctagattatgaattttgaaagaggtataaaacatgtaggatttaatacaagtgtaaaattatctgagtccaataggttaacttgattagtgtaatctaaaatatgtgtcagaataataaatttaggctcaagattattttggtccaacacaatgtggcctcaaaatttagtagtttaatgttggctagcttgtcgtgggtaagccaatttgttgacctcaaattaaaaaaataaaataaaataaaactatgtatatcataacacacactctaccttccctaatatattaatcttttaagttaactaatgtgtactgcgcaatctttatagtttgattggcttcttatattttagcttggagtgaaaatcaaaagaagaaaaaaaacacatttgtatcagtagtggcaaactcatttgtccactttaagcttgcttgattattttttttattttaaaaattaatttgtaaaataattttgagaaacagtttcttaaaaaattaaataaaaaattttagtaagtaataattttgaatcaatttaagatatgagaaaatataaaacaaatttgcacagtaagtttattttgagaataaaatttcttgttattgttaattgtatattttaatgtaatggaagaccaagtttaattgatgacggaaatgaaagggcagccaaagttcatggtattaactgtaatggctcgttgatatcacatacgacaaagtaatataaatgcgaaaagattcaattttaataaggttgtttaattttattctgaaaatacaaataagtttttctcggtgtggaaataaccaaggaaattaaatatttgtgaacttatacattcaattaaattgacctaatatgatccatttaaatttaaattgatctaaatcaatttaaataatttggattgaatatttttttgattgggttaaatataatatgatccatttaaatttattaaatttttgattggattatgagttttaatatctaaaactgttgattcaatccgttaatttatattaaattattattatttatttttataaataatatatctttttaaattttaaaaatcaataactattattatcggacttaataactaagagcgagaagatctcttctttccggttcttccaatttcacttggtcacctttgtaaaattagggtttcaactttcaattggttatagagcatatattttgctttttaatttgtttcatcaaactattttagatttagttaaaatttcaattatactactcatttgattatttgagaacattaaaattttcaaactatgctgtaataattttattttttgggttttcaggttttgtgggtgtaattcttgaacttatttattatatttcaatttttaaattatatttaagatagtatgttagcctatatgatgatgatgataataataacaatgtgattcgtccatggtcttctcttttactgtttgattataacaattataaataatgtatttgatatttcatttaataaaaaattagcttataaaaatattggatttaaaaaaataacaaataaatttaaatattttaacctattcatccaactcaactcaaactatttacaaacatcttgtttaagttgagttttaaattttttaattgggaaaccaatcaaaactaacctattcaattttgtgttggattacaaatttctttaaacttagtccaaaccaaccccagtacactccaatattccattaccattgtgtataacaaaaaaaatatattgtatagcatcataagacgctacattcaaaagtcaagaataagatatcaaatatttaacatatttcaaaaataacctgaatcattcttgtgaaatcatgaacaagttaggaaattcaaatacatggtaagggatgagataatctactacaacaaaatatcccttagttggccatagacattagtcttaacactattaaaaaatgattaaattagtttattatttttagatttaatttgattttcttattttttttattcaatttaatcatttaatttttaaaatagattcaatttggtcctatcatcaaaattatatcaacgatattaaaaaattatactttataatgattttaaattgtcataaaacacattttttaatatcattagtttaatttaaatgacaagactaaattgaatcgattttaaagattaaaagataaaattaaatccaaaaaaataaacaagtaaatcgaatccaaaataaattatatgaataaaaggtcaatttaaccttaaaaaattggaaaaagggcatttaaacaccttgtacttttatcatgtagcaaatagccacccttaattctcattttatctcaattcatacttaaacttttaccattgtttcaatagatccctctgttaactttgcagttaaataattaacagaattaatcttcatcgttgattttaattggtaaaattgacgttgccaagaactgttgtcatctgaatataaacctgataccaacagattctagaattcagcggaggctccaaatccaattgtattatcattcatcacattttatcatatacctaaaaaatgtgaatttgaaaagacgaatagaactttccattttgttttctctccagtcgtagcataaataagaccatcaaattgaacactggaatgtgtcatggcataacaactggagagacagatgaaaacattacacttgtgtttgctgacatcatagcttggttggataagtgggctagcatggcaaatgttgagtccgttaaattaattaaaagtaatgacattgagaaatagacaacaactgcatcacctacaaaatattgacacaaattgcctaattgtgttttgttatggccaacttcagcctcccttcccaagccccaattgatttttccagaaataaagtaaaatattttagccttcaaaatcaaatatgttagtataattttcgtaacaacataaatattaggaaaggttcattggaccgacccatttggctggctgttaaaaaaacaatccttttatgattagtattcccattgatttaaataaaaccattaaatggtacctaaacggaccttgaaataccatccattttgtgattggtaatattattatggttttgttaggaaaaattagctagagattgaaaagttgagaagatagagacaaactaaaaaattattttactaaattataagtatttggtaaaactaattattaaagtagttgaaaaatataaaatgacataaaataaaaataataatttatttaaaaaaagtaataaaaaattttgatagatttattaaggatggaaagaagaaaaatataaaaagcaagaggtccaaaggtaacatttaaaaaatgttacttttagtaacgcttcaaaaaatactagaaattattaaaaagttactaaaaacttatttaccaaatgcttaaataaatttttcagttaatgaaaataattaaaatactttatcaacaacggaaaattcaagttcatagacttcaattcaggttctgaaccccatgactaatatgagctcgagatatgaaaactatacttgaataatgtaggtagtcatttttttattgagttagtcattgtattgaatgcattatgggtagagctattatattttagattactatagtataaattgttgtaacttgtaataaaaagtgagtctcttattcactttctctagtattatataaggaacggaatcctttttcgtcactagactagtagagagaaagacacacgaccgacttttgaggactccacatatttgtacagttttcatatttattatataatagatattatctctgattttatatataagaaatatataattattttatttttaattttttatcctaattaattataaaatcaattaatgattatactcatttttttataaatagaaaatatatttattgagctatcaataaaaatattcgttgattgaaaaataactcatcctttaatcattaactacttttattggtttggatgaattagataattggttataggatcggaggaagtagtttgttgtggaagaaaatcataaacaacgaatgatgatgatagtaataatttcaacaagagtgtagcaaactctacaaattcagagatcaaattgcaaataagtggagaagtaatgaagtttaaataaaaatagaacaagtgagaaggtaaaatgttgaaataactataactgtagcctcttgcactgttgcacataccaattacatccaaaaaaaaagagaaagaaatagaatatagatggcaggaatttgaaaaatggaatcaggggtggtggtcaatcttgaaagagggtaaataacccggcatgtaaagattgacggagaacaaacgacaaagggacattttagtagagctcatataatcctgtgatgactaatgggacctttggcgggccagggttatcctcgaactattattatcttatatccctttctcactctaagatacatgacacgcaagaattaggctacggttgccttttccttctggtcaccaaaaatgcgttgccggaagtcagaaaccattagtgggaggcccttgcgcagatcaaccttgggttcccagccaagttgatccttagccctacttatatcaggctttctcttgtgcggatcatcctctgtgttcggcctgtactctatcctagcatcagggtcgattgtttcttgaaccacctgcatcatcatcatcgtcatcaacgaagctaataatgttaacacatgtatcttgacccccaagaaaaaagaaaaaaaaaacgcaagtatatagatgcattcaattaaatggggtctatcagctatgagactaaaatatagagtccaccgacaaaaatacaacccttctttcttccaaactgacactgttcatttccatccacatgattataaaatgaataaaaaaatctagaatgtaggtaaaacaatcacgccacaaggtaaattgagaataggaaaaatgaagaaactggtatcccatgctaagaatgatgtacaagtgtttttctgtatcagtaaggttcaattcacttattcggatgaacatgcgcctttcggattattagtatgcacatgaccatgagcaatttcctaatctttgtactttcttgtgggcagtttctcggaatcaagcccaggcatgatattagcctagtttaaaaatcagaaagtttcaaccttttacccctcttataaaatatattttgcagaaaaacccaactttaccttggcaagttctagcattgtaaattctcccggatttccaagattgaaaggtcccacgtgttctccttccataaggcggattagaccctccacctataccaacatgaacatcacattaatacagccaaatagcagcatattgagctagattctgaaggtatagcaaccatgtcagtatctcactgcatgccgatctagtccataactcaagtaatcgacgacaatattaagtactatttaattacagtacacgtatcattcatttannnnnnnnnnnnnnnnnnnnnnnnnnnnnnnnnnnnnnnnnnnnnnnnnnnnnnnnnnnnnnnnnnnnnnnnnnnnnnnnnnnnnnnnnnnnnnnnnnnncattcagcttacaacgtgtctttcctaacttcaagttatttagtaggcttttgttagtccattgtgggtcagtgtggagcttgtgaactttttattgagtaaactgcaatcattaagagcttccccacatgggccttcaaactcgcttccagtcacatgcaaatgcttcttcagtgaaattagccaccgatagcatcacacaggacaggagtatgcacaatgaatgagtcattcaaacacacggacgaaccttatcatttactaaaggaaaagacccttttttcagaaatagatgtgaatcgcttctgttaaatttgcagcatgcagatggggaaaagttactttaaagtgtcaactaaattaccaaagctacctgcaatgtaatccaaattcaacccttgcgcaacaagcaccatattatagggggaggagggatatgttgagcattttcagctaaagaacaaagatatatatgctaattacattataagcaaaatacaagccagtggcaattactaagagtgatgagaaagatattatttgcttaccaaatcagagacatattggaaacttcttgtctgcttcccatctccataaacggtcagaggctccttccttagtgcctgcaataaggtcaacaaatagagacaattattacagaaataaagccaacaacaactgctccattcctaattcaaatccaaataaacaaaacgccaacctgagcaacgaagttactaacaacacgaccatcatctaagcacattctaggcccgtaggtgttaaagattctagcaattctaacctgtaaaacacaatacacaagaggcaccgtttaaattttcactacttgagaagtccatcaaaggctgaactcaacacaagaattaaacagcaacgaaaattgatgagagagagagagacagaaaagagtcagttaggtccgtagaaaatgacctcgacgccggcacctcggtggtagtccatggtcaacgtctcggccgtacgctttccctcgtcgtagcagcttcggacacctgtcacacatccatgcacccacacatatcatgaaaccatccatcacactcttgtcactttaagagtaaaaactggcctattttgttttacccctcttaaatatgaaaactaataatatagtaaaggcctaaatatattttttttatgtaatataacattttttaattttcgtcattataaaaaaaatcattttagtccatataaaatatttttgttatttttttatctttgaataacactttaaaaaagatgtctttcatagtaaaaaaatacatatttttttacgaaaagaaaaaaattgcaatgacaaattaataaagttctgagcattgcatccaggtactgtcttgcagccaggtccctcctccttccatagttcccagtttatagtttctacccaagtacttttaccagggctgctttgttgcaatgaaataggatatgactatggatgcgtaacaacaaaaaaatatctctacccttcattttgtggaccagcatatcacgggttcctcgttggccagaccctggaattcctactacgtggtcctctacctccgttccacgtttcttattgagttttgaaaaatatgtctcacacggagtgtgctgcagcaagtgcaaggcgtgtctctgacaattctaattctaaacatggcccagaaaggccggtggtgaccggagaacatagtaagagaaggaatgctaaccaattgggttgacgttgccccagtaagtctccttctgagggtgctgcagaggatctccataaacctcnnnnnnnnnnnnnnnnnnnnnnnnnnnnnnnnnnnnnnnnnnnnnnnnnnnnnnnnnnnnnnnnnnnnnnnnnnnnnnnnnnnnnnnnnnnnnnnnnnnnaagcagggcaagccagatggtagatctgatcaacctcgagcaggagaggctcaacgacgtcgtgtcggatgagctcgaatctagggttcccaaaatggtgcatcacgttctcttttcttcccgtgaagaaattgtccaccacgatcacgctgtcccctctcgcaatcaaccgatccaccaggtgcgaccccacgaaccccgcgccgcccgtcactacgatccggagtcccttcctcttaatccccagcggcaccttccccaccgaatgcaccgccgcagccacgcggtggtggtacgccggaatctttgactcgcgctcgaagtaggagatcgggagagactcgtacgaaacgcttgaggaggaagcggaaggggaagaggaagggacgaatgtgaagaagagggttgctatgatgacgccgaggagaacgaagaggagtcgctgctcacggagcatgtagtgaatcgggcgagtcacggtgagccagggtttgtggggctttggtgagtacgcgtcgtccacgggctgggtctcgtgccctctgaaaatcagttcggagcccatttctgtgttcttcttctcagtcaattctcttcttcagccagggtttggtttgggctttgccaagtgaagagaaaattgaaatgcggaatggactgagttccgagttgggaagagaccgctactcagtcgccggggacgggaatgagatgctggtcaagtgtgtgagggtgtttgatgatggcttttttagtatttaaagagcatgcgttcaaggcttttcctgcaaagacggaactacccctgccattgggtgcgacctcaaggttgggtgagggggttttcagaaatagccactagtaattatttttgccctaatctaaatggaaactactgctactaggcagtcacttttagccttaattatcaatttcatcttaattttttttaaaattatttaacttagtttttaaattttaaaaatatttaatttaatttttaagctcttaaaaataaattaattcaattttttaatttttgaagatttagtttagtttttaaattattaaaaatggattaatttgatttttaaattcttaaaataaataaatttaattatcaactttttaagaatttaaggattaaattcaactattaaaataatttaaagattaaactgatttatttttaaaaatttgaggatgaaattaattttttttaaaacttaaagataaaatttaattcaattttaaaactccaaatcaaattgaatcatttaagaaataaattaataactaaagggagaatgctacagtagtaattttaattaaggattgggatatttcttatttgaagagtgtggctttgaatggtaattggaatggaaacgtgccagtcgaatcaaatcgtgaaaatgatattttgattcttcagtcatacatgaagtgtctgccgccaccggtgatgtcacaagagacacagagccctaacaactatttcgctctttctctttcgttatattatatccactgccccaaatatttatacctgtcttcaaataaaataaataaataataatttagaccccaaaaataaaaacattagaatgatggtaaggagtaactaaggacctcccccaaaaacactcataatgagggcaataatttaaatatagaaaattaaaaccaaatctaatattatagcaatgtgtgtgggtaagtgatacttacaggaccgtcttaaacccgagcaagcactttaaattttttttattactaatatattttaaaaaattattataaaattatatttgaaaataaattttaattaaaatattataaataaccgttaatttttttattgatactgtaagtaataattaataaacaacaactcttcatcaatatcataacttttgtttaaaaaaaattaataattaataactaaaaaaatctaaaaacttttcttttattattatcatttttaaatttactttacacctctcaaatctttgaaatgccttttggatacttaacagggggctatgtatcataatggttttagttgaaattactattatttaaactacaatttgtagacctgatttgggtgagaatacttccaacgattttttctttgtttttgttttctttttcggactgcgtccatgattgtttacacctctcaaacgataaccagatatggaaaggataaactagaggttacaagttgtagaaattataaggtcgatttaataattaaaaagaaaaatagaggtcaagagtttaaattttttctcattaacattctaacgagactaatgattaatatttgtcttgataaaaaaaaactacaaattgttaattaggtgatgtttgcataactaactggaagggagaagctgaaatacccttaatttaagattatgaaatgtccattttcattctcaggtatcgtttttgcaatgattacaacctgattaagccaactttacgttatgtcccgggagtaggggggagaagtcgtatattggtgcccatgatggtttggcgaagtgaagtccttaacggatgtaagttattataagtaacacatttgacacattctaatcaaaattatctaattctaaacctatgcactggtttgccaaactgaataccattcagtggctgttgaccattaacagcatatgcacatgttatattggatattaataattgacctaatatcttaacaaggaaggatatgataacacgctaattagtgtgttgtttagacaagttcttttcttatgtgatttttttccctgtttttatgaactactctttttagcttttgagcaaaatattagataaattactttttaaaaaaatttacatttcaataaaaaaaacacaaattcttataaatgtattttaattttcaaaagactttttacataaatttcaatgtgcattgaaagggtcaaactactctctctctctctctctctctctctctctctctctctctctctctctatatatatatatatatatatatatatatatatatatatctggaccaccgatgtcaccatacaacattttattacccttttcctcgataattaatactacaggataccacgacaaatagaaaatgcatcttctaggtgactcattgcccatttactataatattttttttttctatataagctaagttatgtcttattgttagtttaaaaaattgatggaacaagcatatattaaatgctttttgtttgtgtatagtgtatatataactcgaggtaacattttctcctttttaggcatccttctttttcattcaatcacgacaacaagttgattagtttgataagaaataacattagtaaaaatgggcaataacttgagatgcaaaacacaaaattcgctttataacttgtcaaagctttcaaaaactaattgaattatgttaacctcaataaaaggtttggcgtaataatttgcatatgcttctcaagaagggaaggcaattcccaaattaattacaatgaactttatttattgtagaacacctaacactcacactttagaccagtaggttttttggtaagactatactactggtgtttgttggcaatcatgtgcctgtttccacttgaaatcgcttgattagggcattggccaaagtggtacgaattcctgatcaaacttttcatttgttgctcaaggaaactgattaaacttgacgaaagaaccattagaatatttgaaagtacaaattgtaaatgaattcgttaagtatgttttatattattcttctatcaaagataaagtttcactttactaattcatataatatatattatatcaacattaaaagttaatataaattaaacaaatacgtaaacaattgtaccttaatttgtcgtattagcaactatcccaatatttctcattattctgttcaaaatagtcataaaatttaattacaatacattatttatataaaggttatttacactcttatttatagattgtcatataattaaaaactgttggttttttaataaatttttttatgtgaatgtatttttgggtcaaaagctaattaatgactgatctttctaaatactgagattcatttaaaggattaatctcacactaacaaatgtttcacatacatgagtcaagttaaaaatacatttaggtaaaaatttaattgattaataatgcaattttttatagaaatattatcaaaattaaaattatgattatctaaaagatatataatatctataatttgtttggtaccgtacagatataatatccaaaatttgaacctgaataatccaataacatattgttaccaatcattcttcttcttctaatagaccaacccttatacttgattaatatagaaattgttaaattttttttcatattttcaataaattatataatttaatttttcatcaaaaactttctttataaaatattaaggatatttgtaagagaatgatagaaaaatatatcattactttttccattttaatttatagacaaatcttatccaacattttcaaaatttacttgtcattaaactaaatttttactcaaattaggtcatctctaatgggttgcttttttgacattaacattgtgtagcaactcaaattttactttaaacaactaatatgaggttcaaagaaagcatatttcctataaaagagcaactgtttttctattgtttaatggggtccactttattataatcagtagatgttaccattgagtacataaattaattcacacaaaagtaattttgggttaactaaaaatcttaaatttgaatcttggatataccatgtttaatgcttagaaaaaaaataatttttcgtctatagcgattttacttaattatttctagaaagaatatctatgggctacaccaaaatatattagtatattattatttataaaaaaaacattattggatgaaaaaattatttgactaatgcatcactattataataaaataatgtgaactagcacttatgtagatatgttaactattattttatgtttccgtaacactgttactcaaatagatgcaaaacttctaacgttcaaatgatcaaaatgtcaaaaattctgtgatgtcttcaaattctccaaataactcaaacacgaaaatattgttaaattttcattctctagtttctttcaactaaatatgtcatatgtgagtaatccatttgtaatatcagagcaaagtagattatttttttccattgtcaacaactagtcccttgtgtttagttcactagtcccttgtgtttagttcacataactcaaacacgaaaatattgttaaattttcattctctagtttctttcaactaaatatgtcatatgtgagtaatccatttggaatatcagagcaaagtagattatttttttccattgtcaacaactagtcccttgtgtttagtgggccttcaacaatgagtaacaacaaaattttattctaatcaacaatcataaatattagtctggtctatttcaaagcctcaacttccttcaatttcctcctaagtcaacatggaaaatattgcaataaacgaagataaaagcttgagtggttatgcaaactctaaacaaaagtttacaatgtaagaggatacactaatcattcaaatatggctacatcattcaaagaacttaattatagggattaaccaacagacaaatagtttttttgtcaaaggtcaaatacaactataatgagaatcacaatcgacgccaatgggagagtgaaacaacaatggaatataaattttacgattcaaaggtttattggatactacatataagttgtaaggaggaagaaaagtgagagttttaagaatgatgttatgaatgatgcatttaccatttttaatcaagatgaaggaaaaatatttaaatttgagtatgcatgacgattattgaaagacaatccttaatgatatttaaagtggggtggaagtttataaaaaaaaaaaaaagatatttggtttaaggacatacatatcattatttcctaaatgtaaatttgacccaacatatcatctcctttacaacaccccatggaaattaaccaaaatgatgaaagaaggcgaaagtgaaatctagagagacatcttttgaatttgtagaggttaaggcaataatacaagatttattgggtcaaagattaataataatagaatatcacaaatgtcttaaggaaactcaagtctggctaaaaaagagaaaggtaactttgaaagaatttgatatccttataaagaacacatctaggacaacaaagacacaactttaaaatcacaacaaattaaattacaattttaaaataatagtatttgttcacgtcacattcatttcacaatttggttaaatcatacttaatatattatagcttaacattccataattttttttatttaaatatgcttattttaatttaaaaaatattcgtataaaaaaacacttaaaaggagtaaaaagcaatttggtatatagattttggagtgatatcgaagctctttgcatgacttaaaatacaacttccacttgcgaaaatttatgtacgcaagtaaagagaaaattttaatcattaattattaagtatccctttgactatagtatactcatgaaaagagttcattgttttcacgccaaaacccactttgcgttataagctaacatcagtaacatgccgttttctccaatgaacaggacacatccacggttctctttccggaaaacaagtgtgtgttttggtcagtatttataaaattgattttaaataaaatcaaggtatttagtgaatcaaggtatgcaaccttaaaataatttccgcctttcatgttattaagttaatgaaaatcggttaagagcaagtaaattttggctattaagtacttactttcttttaattaacattttaaatttgatcatttcttttttatttaaaaaataaatcaaggaaataaaataaacaagtaaaactcaggtgtcattagtataataggaatatttactaaagtttaatttatatatttttatcaatttaaagaattgttcacataagtattcaataggaattcactttgttatcacatcatagtaatcattaaaatgatgtggtaataacatccctatatatatgtatgggaattcgaaaattttcacaatcaattttaactcttccatttcaccctcttttctacaaagagcactaataatatatttcttgtaacaccctctttattattaataaagattgattgaaaactacaatataacaagtagatttcgttaaataagaaataaaatttacaaaatcttatgattcttaatcaattttaattgttaataaagagtttattaaagatatatcaaattttttactaatatttctcattttctacaaattgtctccaactattcgttaaacttaattaatcatcaatatatagagagagagagagagagggaatcaatagtttattaaaaaatatatactatcaaatgttcgtcaaatagcatcatattattagtccatctttctgttttgtttcaaccaattattctcaaagattgaatttagttttagcttctccttccgcaatctagctccattcgaaacttcttttttaaagcctagctttgttcccatctctaaccctaaaagtattagtatctaatccagatgcaatttgagtcttctaagtgagaagtctatgatgtctttgatagactaaaaaaaatgtgtttgctagtttgatttgttttgtctctaatcctaaaagcagtttgaccttcatataaatacaccccggccatttcttgtctgaaatgtagtataggttgtttttatgttattgattcgagggaggaggagaggaatagagaattaattgtgtgaatttcatatctcacgtatcacattttactttaattaaaaaaaatcatatttttattttctttacttttattttttaaaccaaatacaaccaataccaatgatcacatctcactcaatcaaatatgaccttgtgcatgtcataaaaaaatgtcaccttaattaatacttcattctccaactttatcagctatgtcagcactaaattaactaaagttaatgataaagaataaaaaaaaaagataaatactaatcagtattttaaagatattgattaacaaacttaaagttaaaatatttttattgaaagacaaaaaattatgttattcataattatttttttttacattttcctatcatttatacatgcaataaatatttttttccttttaggaagacaaaaaagaatactaaacaattgtcagggataaaagtaacaatcttttgtgaagactaaaacctaaataatcatatttgctaagatttaatacatatttaagcgtattaataaatatataaactttaaattgttcaagcattaactttatatataatattttttaaacgtatttgaagcaaataattcatctcatgcttgattaaggcatggttgaagtctcgagaggatatattaaatcttactttcagcattattttttttggtgtgtgtggaatgttcagaattcagaaatgaaattgttccgccatgattctagagtctggagtgcaatgtgcacctcgccaggttccgaagcaatgctgttgttgacctgcaatgcatagtacatgtgaatgtgatgctcataaagtgcgcacgtttattgtacccttcatacgccaccattattgcacggaatcccaaccaagatggaaatattgttaaatttctaacctttgcttcctccttaaaatgaaatatctatatcctaaaccaataggttagttatgggaagatgatggatcaaccactcacataaataaatcctcacagaaatgtaccaataaataatatgtgtgttcatacccagtaggatcgacccctaataacatggggcttgaatagtaagcataaagttaattataagtttaaatctcaatgcggttattacatagtaaaaaataaatatttgttatactttatgtcattaccaattatatataataagtttatttaccataaaaattgtataaaaacaatttttaattagttaataatataatttttttactggcaaattcacctggtccattttattttttttgtgtacgagaattttaaaaataaaaaaaaaatggtccctcactctcatatcagagggacctgcatggaaattaaaagtaaatggtaagatccgggaaaggccgtatctggtgctgccaagttgcatagacagacacgtataaaagactatcagtatctctttaccaatgccgaacttagagttatgagaatcgtcaaaacgattaatgactcctactgtttaagtaaagtcctatccatcattaaccgtatatgggtgtgaattaattggtatgatattattttagtttaattataattcttagaatcaaatctcaaatataaagttgcattaataggaagaactttgagatatacagaattatttttcatgcaatatacttattgtttaaaataaagttctacaaaaatgtgatccgtgatggtaggatgcaactatcaagtccaacatggctttgactttacctcatctaagtaaagaaacggccaaaatggaaaatttatcatctccattgaaagataggaacaaaacaaaggttaaatgcaccagaatattcttttttttaccctcaagtgacggttctagtgaatgggtccattctatccaaataagtggtgtataattaatggaccactactatttgtcatcagatttatctaatttcatttttcttattacacctccacaccagatctatgatgagcaagtggttgtgtgtatctggaggaaaacttgttgctgggtttgttcaacgatggtcaatcttaatgcggtggtcagtaatgttgcatcagaacaacttttttgttttgggagagaagaaaaggattaaaaataaataaatgtcattttcaggaatcgtcttcgacaacaacgaatgctgatcaacgactatagttgctgcagagaagaaaatagacagtactattatgcagatgcagatggtacactataacactgtgatcatcatattactctaaagatcactattaatagtttataatggaccaccaccaaagtaatgaccctaatgatgctacgtgtgtgtatgaagaatgaaccaatccatgaatttcataaatttcatcgttcataaataaaatgaaataatttgtatatatcataaaaaaatatgctgcattactaaagctaatagagaaaaatatatttatatggacaaatataatcattaaaaactaaattaattatataaaattattattattaggtaaagtatgtaaaaaaaagttactttttttacatataaaaaatgttactaagtatgtacatgtaatttatttttaaaaatatattaattaggtgtgggtaaaaagtcatttaagacaaaattttaaaagaaaaatattatgtgtacaacaattcatacaacggtttataaaataatattttttttgtgtctttctcctttttatacattatttattacatgtcataacgatgaaagaaagataaacacaaaaaatatgtcgtatgaatttctgtataagtatcatgatgcaacattagtatgtaaatcatacgttcatacgtaatgcgttacttttattagcttattaaatcaattttttaagttaataacatttttttaaaaaaaatctctaccaaacatttctaatagtttacttttagtccaaaaaagctaactgcctaacttataaattatctagaaggctaaaagtaaccgatcgtcgaaaagctaattgaaggctaaatagttgctacagattgaaaagttaagagttgaaaaataaaagttggtaaacttattcaaataaaaatgtttggtaaaataaattaatgaattagctgatatatataagattatgtcaaatatgatacttatgtacttgtgtgcctacataataattaaaattttaatatttaattataagtaaagtaagtactatatttcatacaaaattaagaaactaaaatatgtatatatgtaattattgaaaataagggtattaattagggcatgactttttagaaattaataggggcgatcgtgcattaaaataacctataagtaatactaagctacttctatttagttcaccaagacagagcaagtcaatagttttttcaaaaaaacaaaaaatcttgaacaaacgccttcaataaattgtttttggttaaataaatcagttgactaaattttaaactaataaattatcttgctaaatatgcacctaattatcttacctaacattcacgtatcacttgcacttattgtttttctttccatatttaagctgtaaaaactccttttttaaaaataaaaaataaaataaaataaaaaaatcatgattgctggagttaatagtattcacttttgatctctttgcaaatcacccgaattaggacccatatttaaagcactgatatatatatatacacacacgtagtgatctccaagaatccgtttgtataaacttttctaatttctacaagtacatctaacagtgaaaaaaataaaaaaattaaaattttttatatgctaaaattagtttaaagataaattaatttgtcaagactctcatacaatagtttatttttaaaatgatctgtaacttaaaaataaataaattttaaatgaaaaaactcatcttattttttttataaatatttatagaaaagtttatcaaatatgtccaaattacctaataatttctcatgtcatgtacttttttttctttgacagtatcttatgtcatatactagtcattggtgtctctgctcggtaatatcgagaataacttgctattgtattttttgtactacttcgcgagaaagaaaaagaacgagcacgtaactcttgaagtgtactcagatcgagtgcaaggattaatgtgtcagtccattgggacttacttgaattggacatttgttttctgcactttcattattgcatcctccatctccaaaatgaaaatttgcatttcagaatgaattttctggaataaagatgcaatagcccttcttgttggattacagcccacgatgcactatagaagtttgccaagggcttattaataatagattgcacaagcaaccagccctttctcagttttttttatatataaaaatatataaatttatcaggattaaaaaattctgacagtttagctttgagttagcccccgtgtcattataatttcatatatgaaaattcgtttgattatttagagttgcttgtggcacataaaattaaataaataagaaactaatacatttaagtttcagtatcgtttctaaaaaaatgtttatatatatatatataaaagttaaacttttttgataacaaatgtgattgttaaactcttgtatttatttgacaatataagaaagaactatacacaatagatcaaattaaatccttaatacgaagatgttattacatctcagtgctactctgtttctctcggttaaacattagatatgcttaacctcaccaattgtcaccgatactctcgctttcgcccacttgcgggacttcttccagcattgctagaaaatggtgctagcgagcagatacaaaggtctagatacctagttagcagttactccacaagcatttctaacactttctcccttttgcaaatactaattgaccagtatttgcgaggaataaaggaaaaataaacacaagcagtaacatactctgataattgtaaaggaagactaagagagaagttgaactagaaagaagatggaacaagtagttatgccgctagtttaatattaacagtacaaaaacagagttgggaatgaccatatagagttcttatggtggacttggataactgtttgactagtttcgaaaatggtaggctctttaaaagcatcgtgcaagccttatatctcactttattgcaccttttccgggggagtttgctgcatttagtagaacccaaatggattttactcaataataaagaatgtgtcagagaatgtgttgttaacatttcttttcaacctaacatgcctctatgtctattgattatgtcaaactgtcaattgggtatgccttgatagttataattattactctacatggttatcaggtgcatttttattttttttaatgtatcaaggcaccgtggagatcagtgctacatcaaatacacgtgggatcttagctatgccaccttaaagcctcaaactgccatgcagaaggaaagtctaacctagccttaaatttgaaaggtttaaatatcaatttaatcccaaatgttttcacccatttgagctttggtatgtatagaattgttgcagtttttgtcttaaacaaatgtatcatacaaatattttctcatttcagtttcggctccctatctttaatgtaccagtccctatattttcacccacttgagctttttttggtatttatagagttgttgtagtttttgttataatcaaatttatcagtacaaatattttctctcatttcagtatcagctcccaatctttaaggtgtcagtccctatattttcacccattagattttaatccctgtagtttctacttattagggttgtcattgttttttcataacagtttggtcccagagggaaaaaaaatacacccttagtgataagacactacaaggatccacaccccattaccccgttgatatgtgtcagtgtgttattttataaggaccaaaatcgaaatgaatataaactaaagggacagcaaacttatctaaactaatttgaaattctgctgaaggcaaattaaacaaaaacagttgggatacattatgtaatcatacaacaaaaaaagggtatcatatacttttaccggtaagatttatatcctgtccactctgctagatagatttgaaaggaaacataggattgggagcaaaaaaaaaacaaagctacaaccacataaaggaatctaagcagaacaattcaaacacccccataaaatcactgtcaacactacttattgatcctaaacaggaaaaaaaaaactagaagaggaaacactttgttctaacctcttctctcctgtcttatcctgatttccgaataatttcttccgagggaagttcaagcgttgccccagcatgctctttacccggcttcaccactgcagcaataagttcggaaaaattgatgaaaggactgagtctacccagatacagattttattgaaaaaagttcctagctcctccagacataaaaacaaaatagataaaatgcaatgccaaaattgcaaacacaaaactataaggatactcttagtaagcaggctggcagatataatatggttagacatcccaaatgccagcctgtaatgaccatgtttggaatattcacacgagataaccatcgacatctcaaataacctcaaatcaactgagatgcccattgtgttaagacatgtgatgcacttccatagccctaggaggtcttaatgctggtgaccgaactcaagacttacataggcaatgaaaggtaattgctaattcctaatggaagacgcttagaaggcagcggctaaaacctatctcagaaacgaatggtcataattggaaatgtcattctcttattaatcaggaattgcgaagattattgccgaaatggcatgccacaaacgcaagtaaattcaaaacaagtgtaaataggaacatgaaagagtttgcggacaagtcattagtatcattctgctccgacttaacaataaacaaaagccaagttttttcaataaaccagctgaagtaacacatttatgttatgatttcctatttctaatgcaagctccatgacataatgattttttttatttttttgatgtacaaagactggaatgcgagtctttcaagtagtgtaagacataattccatataattaaaagttcgtgcaactgcgatgtggtagtgctgaccgaggaatgaaaaacgaaaaaagaggaagcaaaataacaaacaggaggtgagcatacagtaggtgccagaatcgggattgagttgcgcctggacgatcatggtggtgatgaaatgggaggcctcttcagcctctaggagaagcttctggatctccgcctgggagctcacgctcttgttttcctcgaacttgttcctcacttccaacgctgattccttcagcatcatggtgtcgccggaaaatgatttccgtgtcgctttcagaagcgcccggtacgcgctcagaacttgccctctcgccatctctgacactactgatctctctctctcgggaaggatctgcttttttctccttcgcgtcctttttagtttcgcttgattgtacaagtgctatcacagcgtgtactagtttatctcgtatcatttttcttacccttcaaatttatttattttttctaaaataatgtgatggtacattttttttataaaaaaaatattttaatctttatatttttggtaaaatgtaataaattttttatatggatgaatttatcctaattctaaagaaaaagtaaattaaattattcctaactttaaaaaaagtaaccaaaagagaaaatgaactaaacttaaatgatttttaaagtaacgaaaatataaaaaaaaaacttgattatatttgactgaaaatataaggattagttttttatttgtttttttattcaaacatttgaagatttaggatggatttgtaattaaaaaaaacataatttaggtattagaaatttagtgaaaacttgataaagtttaaagatttaataaaatgtgaaatcgagatttgaatagaaaaaaattagattaatgtttaatttaaataaaattcaatattctcgttagtaagtttaggttaaaaaaagtttaataaattcaatacataaagattttgagtaggaatgataatttggaaattttaaataaaagaaaattgatacatgaatcaaatttgttaaatttaaaaaatagaaagacttaatttacttttttaaaaaaacttgaaaaaccaacgtcacacataattcaaattaaaaggattaaaaatacaattaaactatttttataatttttttattaatttattactgcacacatcattatttgaccataatttaactattcaaccctgaattaatattcacttggtctcgcttaaatgttctacttaatatcttaattaaggtccactaatgtatattggcaaatatcagcaactaatattacaagtttagtaaaatcaagaattgaagtgaacaatatctaagacccatttgtttaaatttaagaggcactaagccttgtatttttagaaatttaataaaataaagagtattttcatttagttataattataaaaaatactttgtattgaaaagataatttgaattaaatttatcaaaaactatttgaaacaactaaaacataatttatttgttttattttttaaaagttagtagccaccctaaagattattttttttcaaaataaaaggtaactacttatgggggaaaaaaactaaaataaaccgactaaaataatgagctcggagttctgttgtggatcaactatcaaacaggaattaacttgcaatgaataactgattgcaatcaaaactcagaaagattaatggcaggtcagtacatatagattttttaaacgcaagcccagcatgcgagattatgttttaagatattttttcaactgtttcctatgaaatctgtatgactcagattgaaaagttctacccatccaaaacaaataaccaaagcctaatacttgtaggtccgttcttgtacacatattttccttttcagaaatcattatcgtaagtacaccacttcacacttggatcaaaatataccgaagctgattcatccacatcatcatatttttcatactcgccaaaatactttggatattgatttggcaaatgggtcaggcagtccgtccaatatgcaaggcaagatagaattccgttgtgttcatagtccactgatttctgcgataatcaccttaatgcatcaaccattctacaatcatgcttcctgcgacggcatctatgatgagatttttgatctagcaaggtgttctccccaaccatctccattttagaatctacagctggtgcaatgaaaagtcaagtcagtctctgaaacagccaattatagtactagttttatatgaaacaaatcaattagtagataatgctttgaagatatttgtatgaaatccaaaaaacataatcagataagcacacaataaactagagcctttcaacctatccactcttgcataacacattggtttgtgtgtccacaatccacaggaacacgcaacagaggatcagtaaagtttatcagagtagcatttagcttatcctaattgaaagttccatttaaactttcatggcatgctatagaagagcaacacaaaatctttatgaaaggcagctagcaaatatagcaaattgtcaccaggcatcagttgaaaaggcaaaagcaaaaacacaatttcttgtaattgcatttatgctttttctagtgattaatcaatatcttcagaattccattcccttacctaaaaagttactgtccaaacagcaatgccatttctaaacaaccttctgttttctgaaagtcaatagtttttggcacaaatatacaatgtgcaacttcataatatcatgatagcacttctagaaagaaagaaaaaaaaaactctcaataatcttccctttcaccacactatggtcaccaacacaattgtactgttccatccatcgacttgtgatcattgagacctcaagccccaaccatcaaacctagatttttgcaaagagttatcttggcaaagagtttctcagcacactctccaaacatcttgccaagcatctagaaactgggaattaacattctttaaaaacattaaaaaaaaattggtggccttttaaaggcagctgatcaaaaactatactttagatcttcgtcttcccactcaaacactacatagttgaaaaggggaggaggatttgaggcaatagattgtcactgttgttttcccaacaaggtgtaacttcaaatagaaaagggtcctttttaataagtcgggatgcagattagatgatccttttattcaccaatcagaagctttaccaaactccaacaagatacatagcataatggaatccaagcatcaccctcccaacaccaaatatattatcattgaggctaagtatggtttgggggtaaaccagggagaaatttgaagttaagctttcttaaaaatgagatgtttggcaaactaataatgaaaagagaattttacaggaacttaaatttccctctttaaggagtaaaatttattcccacgtgagaatatgatcattttttttctgcctgagtcgtgactttcattttcgtatacataaattttcagtccaaattatccagcaaagcctctatagtatattttaatccaaatgttctctggcatcagcttctagtctcttctctacagcctcttctgttgacgatttaacccctggcacctggagtttattcacaggaaacaatgctgtcactttgatggattccaagacttcctcatttgttatgctgccattgactttgccagtaacaacagcagtttcaaagatgtttttcttcatggcacagcaccacatggctctaatgttcccgagggcatggtttgggatgaggtttgtgtggactagggtctgacccatcttgggccacttgcttgtcccgaaaatctgtccagagctcaatggaatctccatgtcgattcctttgctgtcacaaataaccaatggaaaagttctgctgattttattttatttcatttcatttttagaactaaaatttttatttatctcccaataaatctttatattttaaggtctaagaaatttcactccaacaatatttgctctacaagaagtttctccctttttccccttggatgttcaacttgattctaaatacaccctaaataataatgattaatgtcgcaaacattgatgggttttctccagcaacccagcttaaattgcaccatagcaaaggcaaaacaacagacaatacgtatacctatatgtaacataaacatgttatcttcagtttttctttcaaacaaaggctcaaaaagcatatccaaaattgaggagaaacaaactcactggtccaatatttggaatgccacaactttagaattgagcagaatccacttgaaatgaaataattaagaaatcccatcaaaacaggtaggacttacaaactcactatgaatgtcattaattttgagtaacttttttttatcagttttgagcatttatatgtatatagtataacattaaataagctatccttctatctactatcccgctatctgctattcagctatagcatttttgggacacactactacattcggctatccaggatttaaaacactgtaagaatattaccccaaaatgatttgtgaatgaactgaaaccttattatatactaattcaaacaagttttgtaaaagaactcacagacaaaaaaaccaatcctttcatttgaaacattcctaacacaaaaattcaccagccccaactagaaacataaatataaatacctcccaagcaaaagcaaaacaacaagttagtgcgagtttggattagcattggcaaaattgactttgaatggaattaattttggttaaaattgattaggaagtgatgtgatttatgttcagatgtttttattatagaatcaagttaagagtaaattttgaaattttctgatccaatacaaaagatactctaagttgctgcaactcaatcaattctggacctagaaaactttgaaatgttctgcaacatgaaaccaaacatgtaaaatcaattttagacccaaaatcaattctctaacgtcaaaccaaacgcacacatcaaacatcatccacgagcttcaaaggaaaaagaaaacaactaaatccaatagaaaggaactaaaacagaagaagctttacctccaagttggtcaccccagaacaacaatctgggatcatcttcttcctcatcaaactcatccccatatccaaactcagcatccccgcgataacccggttcgctcccataccccgattcattcccattcgcttcagaacagccactcaccccaaacccaacgcccaaattctccttctcgccactcccgccatccctctctctctccctcctcgaattcttcgcctcgctcacgtccgaagaccagttcggatcgccgttgccgaagagctccccgctggagtcggtgcccatggccaccgggaaatcggagcaggtgccgtacgcggcggaggcccccacggagcagcaccggcgcgtcccgctccggtcgctgctgcggccggacacggatcgcgagccgcggcggcgcctcttgcgagcgacgaggcggtaattggtggcgcggttgttgggattgtgattgtcgtcgtcggcgagggtgagtttggacatgtcgagggaaaacgaggtggttgtgcgatcggagaggcaggggcgtttgtggtagtagggtttggggtggggcccgtcttgctggagcttgaagggtttccaggtgcggagctgcaacaagcaggagtctgtggtgtggcgcgagtccaaaggcttgtgcgacatcgattgagtcatcacagacacacgccaagttggaagagatatcagagaatggattttgatattttgtgcccacaccactcactgcctccactaatattcacttcttaccatagcagtacatataatcaatattttaatcttcatttaataactattttcactgaattcaattctgttaatacatcatgcatataaagctttaaatgttattttataagtcataattttttttatatattggttttgcccctgcatgtaggatccgtttaatttgttaaaaattatgatattggatgggataattttcttcatgtttgatttaaaaaatattaagagacaataatatataagatgaaaaaattgtgttgttgcacatttaaatttagtaaattttatattattttatttgtattatttattatccgtcaaatgatgtacatataacaaattatcatgtatgtgttgttattcttgtattgtattttgatgtttataaaatgcaatcataatttcttttggtgtattatgtttttaaaaattttattatttaaaaataattaacatatcaaactaatttatgaaatgtttaaaaacacaatctagcataaataaaaatacatataaatgtcatgttagatttattagaaggaaaagaagatatggggtaagtgcaaatgaacgagaaatagaatgaattttctaagtgatttgtttgagaaaaatatagaagaaatagagaaaataatatatatatatatatatatatatatatatatatatcaattcatttattttgacgattcaaaatttttagaaaaacatcgtatacacaaaatatatctcacacaacacctaggctgttcatttcggctcaattttgtagagaaacaaaaggtttaagttctacatcttcctaatatattttagacgaaataagtattagtttatgatgatcgttaataatacattcttcctaatatatatttttgttattggttaaaatttgtgaagaagttataaaattataaatgtaacttattaaaaatcaaataagacttagatatttgtgtttttttattcaattttaaccaataataactgtgttagtgatgtaaaaaaatatttctcttaatatgtgttcaattccacaatttaaatatgatttttcacatcccaaacttaaaaataagaagttaaatgatttgaggaaaatattaacctatgcacttagaataatcaaaagtataagttttttcttattggaaagtacatcaatatactaaactatgatttctaatacaacctcaacttgaaaactttttacttattccttctttaattagtatcttaaaggtaaaataaaaatcataattacatttctcctgaacatatcccaaacacactattaatttattggacgtttggaaaggaaattgaaatacattggctagccgtaaaaaatcaaaattattacaactgaaacaatcacgaatgaataaccattatatcataaaaatattgatcgactatgtgataatattacataattattatttcatctgtttctttttatttgtcttttaagatttttatattaaaattaagaaatacaatacattttctcaatcataataaaacagttataagatttcttttttcccccttttttcatttatatttcacaataaataatatgttaattgattaaagattagataaaaagtaaacaactaattaagaaaagagtaattgatattatcttaaattttgaaaactagagatagataaaaatatattttttaaaatacccaacaattagacatgaattaggaagtgcataacttcttagttttctcaaattacttgtagtatgtttgattagccgttaaaaaatctccaaacaatgattaaataaaaaattatgaatttttgcttgtcacaaaatatacatacatgtaattgtacatgcttaatctaaaattaaaccaaacatattacattttcagtatttgtgacttttgaaagtccaatgtgaatcctagtgacctagtgacacatatctttgaggttcaagtgttgaacttaactgaaggtaaaatcaatgcaacaaaaaccttcctgccaagagcgataaagtggtgatctgaacttagacactagactgcccattgtctttagcccctaggttttacttggcttgttctttccatttattctttttcaattatatttataatcccgaacatttttttaagaatccaaaacaatgaaaaaaaaaatggagataacagctgggtgcatgtgcaaaatacaactgcagcaccgtgtatttgaccttctccttatcattgggttggactttgaagcacaagtttacaaattacaagttattatcccacaatagttttaattttatctttagagactatatatgtatttatttattttttacaaatattaatcaatatcgtaaattaagaaacttaaagtagaaaggagatgaaaaattgcattgttcataatttttttgtatttttctatgatttacacactaaacattttttattctaattcattaaccaatatccttaagatcctagttagcaatatcttttttttttttttaagaaatgaaagagaaaagaaaaagaaagaaccaataataaagtctaacataaactcaaagaaaggtagattcttataaacatattattaggtgtttgatttatgactatatgtataaaagatccagtttattaaaacagacaaaattaattttcacgaaattttctgtctaagaaaatagtctttaactataagtttaaacatatttttagaattaatcttgattccaaaatcaggatgaagaattaaaaacgttgaagaaactattcattactttgaacattgaaactactattaacagctttgaccataaatttaattttgaaattgattttaataaaattaaaagttactccaattaaatacacttttgttaagaagattaatttacttaattaaacagactcgtatgagttgtgtaaatcttcatagaatctatcacatatattaaaaaaaaaacacttttatttgtgacagagagagagagagggtggcataataacagatgccagttgcgcctcaagaaaaaaaaaaaaggtttcaaggggctttgggcatttaacagaaggcggttgtatctccaagagtcaaatccatttgcgacagaaccaccaaacgacgatggaggaaagcgttttcgcagcgctaacagacgacatcgtcctctccattctggcgaagctagacgacgatccacgacactgggcgcgcgcggcgtgcgtctccacccgattctccaccctcattcgccacttctgctggaagaccaaatgctcccaaaccttcccctcatctctcatctcctccgattccccctccacctggtcctccctcctcaagctcgccgtttgctgccccggcctccgccacgccggcatccccgccgaccggaacgccgcgaaacggatgaacatctgccggaattcgcatttggccggcggctatcggcatctgaggagagaacagggatgcaaacttctcgcgagacagttccgcgacgataatttgttcctctgcgactggcccggctgcgtgcactcctatcagaggcgcgactacatgctcttccgagggttcttccataacttcaaagcgagcggggtttggagaagcatcagcgacgagaagagaaggaagatcgatgtcgagtgcgccttctgcacgtgccagcacacgtgggacctccaatccgccttctgcctcagacgtggcttcggctaccatctcgatggggaaccagttgttcgagcttatgtctgtgagaacggtcatgtctctggggcttggaccaatatacccttgtactcttagttgctttaacattgtttcttttctttgtgcttctgaacgtcatgtatttttttttttttttgtcttagaagacttgaattggatctttatcagattcaaaatcatgctcgtgctattgggattgacgaaatccttctgtttgctggggattatagcatttaatatttcaatcttatgttctgctaatgctactatatactttggactgaataatcaggtttagaattcttggattttattattgtttgcaaatttgatcactttttctaatttttctatagttgttggagacgaaaaggacaaacttttaaagtgtgttgaagttgtgttcattcaggatttgcatttgcattttgattggttttatatagatcagagtttactgtttttgtctgcgaatgcaatcttacgtatttcaaaattggtgctttcagcttattttgtctggattgtcaagttgtgactgtgacaaatgctgcgggactttcgattgtcttctatttatcttcacaaaaaataatgatttttcttctttttttttttcttgaaaaaaggataggaaaattggggtgaatttcggtcttgctttcactttatacttatcacttgaaatatttaatttgtagttatcagaatttcgaaagcctacatgtatacaatttgtacgtaatgctagcttcaaatatttaatctagatagatcttttgaagggatatatataggacatctaatgctgtgattgtatagttcttcgtccctggctttgcgacttgccgttgaccctttctttggtgaatttaaagatcaacgttggtctatgtcaaacgccgagttcgtgaaatatttcgttcagaatcagagtcttacattggttttgatttcttaatttttgagatgaacatgtgttaaagagagctagtaatttaggacgttaggcagatatcctgttcaattgagaggcaatttgatatgtgataaacctctgatttcgaggacgaaggacctccaaagaaagaacaatagagagagagagaaaaaaaaatagactaaattctcattacccattcaatggaattacagggatatataagtagagcacctgtaattgctataatattctagaatctacctgaaatatttattctaacaaccaaaagagccaatttgtaaacaacataattgtttcatttcttagctattgaaatgatcctcttggatctagtattctcagaagttgcagtctgttctttagtaagggtaatgttgggctcaacactaatgggctcggtcataacaatattacccgcatcgaaagcaacatcgtcctcaaggttataaatagtgcacaaatgatcccaattttcccaaggaccagcagaagagaacacaagccactcaaccaaagttggatgggcaaggacggcattcacagtaacagtttggaaatccagaatcagtgttctctagggcctgaagatggtgccatcaaattgagtgagtaagggagcaaaatgaggcttaagaaagtaagcttttaccagtactacatatgaggcatttgcaactactctagctagagtatatccttgttacataggtgacttgaacaaaaacttgttaactctgtcatatgagggaagatctcttcaacttgaacaataactgatagcttaaccaaatgaacatgatgaatacttccaactatggacacttccgctttaaactcttttgcaccttgtccaacaccttccaatttttttacagccaattgagtgccatcttcaagcacacctagatacaccgagccaaaccctccttctgcaatgtttctggaaaaatcctcagttgctctacaaaaagcagcaaaagtaaaatgtgcagtcatcccagaaagtctgtccaagaaattatcatcttcgtccaagttatcttgaggatacttagcaacattcgtcttcctcttgtagtagtaccagaatcctgttataagaccaactataatcagaactgtgagaacaaatatgacaactactagcaccgtgtcattccttccctttttgttgccatgtccagcatcactactaagggtaacaaaaaggaaaagttgaggagtttcctatacaagcctctttgcaagcattcatggttgattttggaaccggtgatgtgtacttaaaaagcaaaataatcaagctcttcatcaacatatataaatttcgttgaactcctagaacaggtggagatgttgggaggtttgcaattaaagtgagatttgataagtttgggatagatgcaccagttttcaaagaagcaaccacaataaagatcactagactgaggaatgccacaagggtcttgtggtaccttaaccgcctcagggtttggagccctccttttgttgagatcataaaaagtgattgcaccatttggatccaaggtagcaacccacagtgacttaggatctgagtgctcagagtagacaactttccacaacaaagctctaaccccttcggatatcatagattttacacacccaataaggctatcaattgtgtaacttcttaggtgaccccgaacatgctttgtcttgcaataagtgcaagcacctaaacaaccaacattaataggaagaatctcaacaaactcgttcttccttaccttttgaagctcaagtgttgccaatttctgacaggtcaaaaggcgcacttcatgaccttttaaagtcttctctacaatttcaaaaacacgattgatttgctggactccaattatgctgatccgttcgaggtctttcaaatctcgacttccttgagggaaacaaccaacaacaactagtggtttatttgaagattttccttttgatatgatggcatccatggcatattggcttggggatttaactgtgcaactcttatccaactttctctttggaagtgcagagtcatgaaatggaggatggtgttgagcatgtgccaagtatctgttcttcatagcactagaacataaccccttgtaaaaggtgcttacaagtagtgcatttgctacccatcatgtatcatcaaacagttggcgtgcatcagctacccgagcattcaataagacagtgtacatccaatttcttgagagatcgcataaaccagacaaaagagtttggaatcgcattgcatagcatttgtatgctattgtgattttgctgaaatgcctccattacagagggtgcttctagcctttggtagcatgtggaagatagttgcaaagcattaggtatagcaattgacaaaaatttcatctcagaatctgtttgagtcatgcaacttgggactggagaagaatctatgaatgaaaatagagctacctctggtttcgaggacagaggaccttcaaagaaagaacaatagagagaggaaaatagtcttgattcgaattagagagatatataagcagagcacctgtaattgctataatattctagaatctacctgagatattctaataaccaaaagagccaatttataaacaacataattgtttcatttcttggttactgaaatgatcctcttgggcctaatattctcagaagttgcaataatgttgggctcaacactgtgggtagagagagaccacaaatactaggaaaacaaaaatattctcatgcataaaaaaagtcatttcattcattttgtaaaaaaaaatatatctttattttggcctttaaatgcttgtaaatttagtgcacgtgtttttaaatgaatattaaggagtgtgcttcttctgttcttcgtatagcaccaatatttgatagggtgggattggattttctttgagactactctgaaagattttgggttatatcaataataagagggtgcggtttttcccttctactccgactaacaatttgttgggggaaataaacacttaattaaactcttaagttataataaataggtttaattacctgacgtgtatatgatagataaaatctacgataaacatttgttttcatccctggatctaggttgttgttgcctcaaaggcatgaaagccgtcatgctttttcatctccatgttttcaacaaatattccagaaaatgatgtagcgagcgtgtcacatttggaacttaggaacataagtgacgatgattactaggatgaaatgttgactaccggactttttattgtgaaagaaaataatcagcactgtacattgaaagaacgtgaaaaagtttaaatattataagtatcatgttataaaagagaaaaaaatatattcttataaaaaatatattaatggagtctttacaaattacctggaattatgttaatttttataatagacaaatattaatttattaaaatactagttttattaatagaaaagatcaaatcacaacctttttttctcctttaatcatcctttgtcctattataattgttttcttaagttattttacatatataaaaaaagtgataaataaatgaaaaaaataataattttacaaaattaatcttatattattattaatttatttataaattttgttatctatctttaatattataaggaatataaatgaaaaaaataattaatattaaattaaaatattaaaatgataattattttgaatcaattttttttacatgataattgtaatcaaacaagttaaatttttctatagaaatagttgaacttataaaatgataaaaaaataataaaagtatatttaaataagtttttagtccatataaaatataagatttttttatttttgttttttaaaacgttctttggtttcactcttttttgtcacgtagcaacaacattatataattatattaacaaatcattaactcgtcaagtaattaaaaagtttcacgacaataacatgtaattttttatcatttatatttttaaattcttgtatatttaaaacaattaataatattaaactaattgataaaagatttaaaaataatttaaaaatgttaaatgtgactttttttaacagacttatggattataagctaacttaagaagttatcaaaaagtcaattattatgcaatcagttaacacagatatttaacaggagaaactaaaaccaataaaactaaatctttaaagaactaaaacgaaataaaaacttcaacagattaaaataaaacacactattttatattttacagggattaaaatattatttaaattctaaaaattatacaatagaattcctttattgacaggtgttcacagattaaaaaatagtattattttttacggacattagaaaaatcttatataacaaaatatatttataaagtaacaattttattaacacaagtaaattttttagtaaaagttaatcatcacaaaaactaacgaatgcttcagataaatgtataatataataactaaaaaaaataattaaaagtataccatatataactgatttaatccttctcaacacgtgttcaaacatcagaaaaatcaattttttttatacatacattggaaaaatcaaacaccacataaaatacattaatgtaaatttagatatttaaaataataattctgtcaacatcaatccatgcaataattgactttatgttaacatttctcataaaatatcaacaactaccactaggatcactaggcctttttggcacattcgattctagatgatgactttctccgtctctacacgtaataaatgaagtcctaagatgccatcgaaagaagaaaattaaaacgaacatgcatgtatctatgaatgatggaaccaccacaaacgaggttgatgatcaacgttttcatagtgagtttcttagcactacttgtgaacttggtggtgggagtgctcggcgctgataactatagcagagatgattttcctcttgactttgttttcggttcaggaacctctgcttatcaggtacctacttcaatagtattcctctttatttcttcgtatcttattaatcatttcatttcttctatcactctatttgtatgtcccaaaagcaatttaatttagccgattagcaagtattgtgcaaagattaatatatagtatagtataaagtggtgttgttataatcattataaattataaacaggtggaaggagctgctaacaaagatggaagaactcctagcatctgggacacctttgcctacgctggttggtggttaccaattataggctttgataattttggaaaatttcttaatttcctcaaagaaatagatatttaacgtgacattttatgtgttaattctttttaaaaaaaatattaattataaaaaggacctagcatcccgtctaatttgatttttataaattggacttgaaggaggatagtatattaaaaaggataaattgttaaaaggatctaaataaagataagagtaattataaaaaggacctagcatcccgtctaatttgtttttggctagttggaaattgtgcgtgaaatgcgcatccaaataagagaatattataaatgtctaattgagaaagtgaggagagaaaattttattttctaacaattatatttcttctgaaatctattaaaaaatatgattaaatatgttttcaatttctataaaatgagtgaattttagttttggtcttagtaaaaaacaattctttaattttcattcctccaaaatcttaaattactactttttgttcgtagcactgatgcatgtcatgtttactgatcatttacttaggaaacgtgggtctcatgcaattatttttaatgaacaggatatgcccatggagaaaatggagatgtagcctgtgatgggtaccacaagtacaaggtgaatacgctgcacctcatttgtggaaaataaaaaagattgaggcataagctggacaaagaaaacaagcttagtcattattttgttctacttataatgccctttaagacttgaaaagatattaattgttttcacgaaaatatataatacaggaagatgtgcagctaatgctggaaacagggcttgatgcctatagattttcgatttcatggtcaagattgttaccaagtactgtaatattgaacgcaaactcttggaattttatgtatctatatttctttttagggtaaaagctttctcaacacttaagaaaatgcttttgtttctcctcagatggcagaggacccgtcaatcccaaaggattacagtactacaacaatctcatcaacgaacttatcagcaatggttaaacttaattaaatacgagtttcttaattagcttacaaaattaatcatgcctcgtattcactccaaataaaaaaactgatatatttccctatttccgtggagcaggaatccaaccacatgccacgctacacaactttgatcttccacaggtacttgaagatgaatatggaggatggattagtcgtgacatcatgtgtgttcctgatctcttgtactataattcattaatttttgttactggaagaatttgaaacctcgacctatctctccctctcttcatcctttaactagtaaaccttatatctcctatactaaaattaattcatgaaaatcccctgcaccgcatattgaaattgtagctatcctaacaaatgggtgtgcatgcgttaacttttgcctagcaaacaagctccttatattattaaatcatgcacaaaatcgagaaatactaatggataaattacttggatataaatgcagaagagacttcacatactacgcagaagtatgttttagagagtttggtgacagagtgttgtattggaccactgtaaatgagcccaatgttttcgccttaggtggttatgatcagggaaacagcccacctcgacgatgttctcccccattttgtgctacaaacgacacaatgggcaactcaacatatgaaccctacttggctgttcatcatattttgttatcacattcttcagctgctagattgtactggagaaaatatagggtatatcacctaatcttacatatatatgtttaaatgccaaaagcttcaatttatgggtttaaatatatttttattctttctcatttagtgttttttcctattggttcttgtaaaattatttttttatttttaattattatacattatatttgttttattattaatccttaaaagactcttttaagataatattttgaaatgtgaaaatacattttctaaaaccttataaaaaaataaaataaaacaaacataagttacaaaaactaaaaataaaaaaataattttgtaaggacgaaaaaattataaaaaactgctgagttacaataagtaaaaaagtatttaagccacttatatacttttcattaaacttaaaaaaatagtctttgcaatgttagtgtaatgagtttttgtaatgttatccaattacatattattatgtttcataagtttgttaattaagattttacttactccgactagcttaaaagtgatgttataatttttttattagcggacaatgtaataggttttatgcacgcataaaaattaaacttataaacttaggatccttatctgcttctcaatcttaatatttttgacatttattcttctcatacggacactgatagcaaagaatgttcccattttctaagtaacttaagtggctttgcaggacaaacaacatggatttgttggtatctctatttacacgtttgggatttttcctcaaacaaatacagaaaaagacagggtagcatctcaacgagcccgtgatttttttgttggttggtaagttacagaccctacaattggttagttttacttcttagttctttctaccccttgtgttccttatttgttctcttaagacagaagaatatatataaatgaagttttatccattaaactttctgctattctattctttcttcagttccttaaaggcactaaagcttgctttctttcataggacatacacatagctgaagaatggcagatttaattataagcctgttttaatattgcaggattatggaacccctgcaatatggagactatcccatttccatgaagacaaatgcaggtgaaagaattccggccttcacaaatcatgaatctaaacaagttaagggttcatttgacttcataggcgtaattcactacaccaatctcaatgtctcagacaattctgacgcccttaagaaccaactgagagatttcactgcagacatggcggcaaatatctgtatgtacttcgttaagtttaaggataatatatttagtaaaaaaattaaagttggtcatataagattgctgtggaaattgaattcacgacgccttttcatcgtcattatgaaatttccaatctgttgaacttacacatcatttaccatctcaatttctaacaagaatgtaatatccctctacaataacctaataatctcttgatactttttatctgaaaaatttaaataaaaagataaatgtatttaatatcttaaacatgaaaaaaaaccaaatgcattatttattcagtaattaggttttggggaattatgtgaacaatgttgtagaataacttaaatttatcaatttcaatgaactcgattgcctgattcatccatttctaagtaatgtaatgcctcatcactttcttgattttgcagttggagaggatctgttttcaaatgaagaggtaacaataaaataaaaattatttgtcttataataaattcgttcaattttttagattacttcattgtatgactaactggctttacttgattgattagtaccttataacaccgtggggtttgcgtcaagagttgaataaattcaagctcctttatgggaatcctcctatatttattcatgaaaatggtctctctctctctctctctctcactctctctctctctctatagatatatatatatatatttatatgtgtgtgcgtgggtttgttttcccctcctatgaccccctcccaaatgacagtgttacataatgacaaaagtgagtaacagttgaagaagattacataattccggtggatattttgtagtaaaatcatctctagttgttatgagggttgaatattaaattggagtcagagttttgatgtacctaatagacaaagcaacttggtagcatttaatgtttcaatcatgtcaattctttcttataaccttttcccacttcattaatacatgtatccaacaatgtcattagttagtagcatattgctattaacttgtattttcctatgtatggccatcctaagttgcatggaatttgaactcaaccatacagtatacttatagtacatgtaccaatggtaaattattaggaagttctgctgatgatagctagggtgctcgtgtggaacattgcgagcttaaatgggctgagttactgatgaatcaaattttgggttgttaggtcaacggacagcaagtaattcgtcactgcaagacgtgacaagggtgaaatacttgcatggatatattggtagcgtgcttgatgccttaaggtttgtagtcctgctctagttcatgcaacacatcaaaaaaatattttcttaatcacttccaaaagttttgtggatgacttgggaatctaaattatggataacaaatctattgaactatattgttatatatatgaagtttttaatttctgtagtgatcttgagaagggacttactcaaagaattaatcaaaccagaacatacactgacacgtaaaaaatacaaattcttgaaatagaaagaacaaagtggttatcattagaacttaatacaacattttcttttcctgaaagtgtccacataaacacctctaatgtgttctctgatcttctatatcttgccaaattttctcagagatggatcaaatataaaggggtattttgcatggtctttcctggatttgttcgagttgctagatggatacaagtcgagctttggcctatactacgttgatagggatgatccagagttgaagagatacccaaagctctctgcaaaatggtacaaccggtttttgaagggtagaaggacctctatagttggaactattgaacttgagaaggatccatcacttgtttttgtttcccaattatttgagtaggttctttattaatttcttttcacaagatcatgcttagtggtgttattagctatgcttacttttccttgtatacatacataaaataagaatttatgtggagggagcctagctgcccgggcaaaattcctctcaaatattggtaatgtttaaaagagatattccttttctgaagatattttactaaaagtaatatgtgaaatgtaatttagagtaaaagctttcatcattttcactctctcaatttgataatttcaatattacttttgccctttcctctaaattacattaatttcgcatattatttttgaaaaaaaaattctctctcaatcatattaaattactctccttttatttgtagtatttgtatactcaatatttttatttgctatttccaaattaatttgtaatgcttttaaaagagattatgactatgtttagttattttaactaatttcaattttttttatgagttgaaaaatttatttgattatttgataaataattttttttactaatttttatcattttttaataaagtaatgtttttaaatacgttaattcctaacttctaatttttatattttattcccttttattcttaaagtatttattaaattttcttattacattttttaaataaaacagatttattatttatttatttttctcactcattcctcgtacacgttttttatattattatatttcaccaaattgataataataaatgttaaatttattttattttaattttctattaacttttgaataattttatattatatgatttattttaacgtacttaagtgtgttttttttactttattttaatctcgataaaaaatattttaagatataatataagattaatagtagaatatataatataaaaaatataataattgaaaataaaaatatgatgaaaataatttatcaataaataaaaaatttcaagagtttaaagttaactaaaaatataattataatacttcaaaaatatgtttttatgcataaaataaaattgaaacttatattaaattataatataaatatattcatttctttcattttatattttgggctaatggacatcagagaatggtgtattttatgtggatagtaagggagctgccttcagcaaagcaacgagctcaaaaaatgttgttgcatgggagcagtaaggggagagttgaaagaggaaagataactttttttggaaccagcatgtctaggcaaaggcaatatttcaatctgatatattcaacaatgctgcaagaagtctcattcatatgcatcaagaaggttgatataatttttaagttcaaatattatttatctcaattccaataaatataaaatatttatctatctccaacagttttgggtggcagcaagttaaatattaagatttaaagagataccatgtctttctttggtcactgatgatgaatcaaagtttctttacctttttgtaacatacaagggagagtaataaagttgtcgtagttgatatttttataaaattgggtcaattaaatgacacgcttttatcatgatgatgatttcggcaagttaactttatattttaatcaatagtatttgcaacaaattacggccaaattcatccattaaacgcttattatatttttattgacataatgtaataaatggatattctgcatttgagtgttttattgtattaaaaagtttttatttgtaattccataatttaaatttgatttctattttgtttttttcttcttcttatttcataactcctataacatactgttttcttagtgctataacacatttaacttttatacttgattatacatcagatttatttatatcatttctaaataacaataatagttaaaaaatattgtggctttttcatattatattactacatattatgctgatttcgtcaagtttaaataaaagaataaaaattaaaagaataaaaaagtagaaggcaaggattatgtattagattcattcaaactcttataaaaataattatagtaagcataaaaatatatgataaaaaatattaaattctaacataatattttaaatagagaatacaaactaacattagcctcactaagtagtcattgtttgctcgtgctaattgccattattgttaagtatatgcatgtcaattctaaaaaaatggtataattctttgttacatgacaagaaataagatttttattgaatgggatctacagtgatgcaggaggataatttcatgacacaaatttgggttttggccaccccgacttcttagttttttttcttttatttatttattatttattataaattaaaattaaatattatattatgtaaaattatttttaatagattttaaaattatttatttaataaattaattttagaaaaattattttgtaatttttttaaagagaaatataaatatgaagaaaaatataaaaattggataaaattatagtataaatttgtatttatgttatatgtaattttgtaattaaatttatgttttgttgatttttttattatagcatccggtgttctaataatgatacgtaataattctataggaccaacacacgagtattgttcacattaacattgtgtaaacattatcatcatttttcaattgtagagattgaaaaaaaatattgtggacctgcatctatgaatggttgtcggtagtagatttcatttagtaattgatcgttggttagttgaagggtgttatgcattctacgcttgagtgtatcaaaggaacagtctttaggaactcgcattggtgttggagtgagactttgaaaataaacaccagtttggttgtgagtgattgattcatttagaaaaataaaagttaatctggagttagcaatggtctgacgacttgtttctcccaaaaatgacatagtaataagattaaatttggtttgtgaaattatgttgtgtgagattatgtgttagtattgtgtgtgttgtgttatttatagttgtatgagtattctgctacattgatgtgtattgaaatccaatgtttcttttttcctagtaagtgacgtaatagacgtccattataatttcagagtgaacaaagagattatgagttgtccatctcatgtcagttttgcacacatttctaaaaattaaatgtctcacctgcaaaattgacatgaaatggacagctcataatgcatagtgttgtcaatttggacggtgatttttcccatgtaattaaagcagcagacgttcatgatgattttcagagtgaacaaagagataatgagttgtccatttcatgtcagttttgcaggtgagacatttaatttttagagacgtgtgcaaattgcagagtattgtcaatttggactgtgattttttccttgtaattaaagcaacaaacgtccatgattattttcagagtgaacaaagagattatgaattgttcatttcatgtcagttttgtcgatgagacatttaatttttagaaacaatgtagtgtaaatgacaaagtattgtgaattttgacagttatgttaccatgtcaactactgcagtaaaagtggtggtgggagtactaggcctttttggcacattcgattctagatgatgacattctccgtctctacacgtaataaatgaagtcctaagatgccatcgaaagaagaaaattaaaacgaacatgcatgtatctatgaatgatggaaccaccacaaacgaggttgatgatcaacgttttcatagtgagtttcttagcactacttgtgaacttggtggtgggagtgctcggcgctgataactatagcagagatgattttcctcttgactttgttttcggtttaggaacctctgcttatcaggtacctacttcaatagtattcctctttatttcttcgtatcttatgaatcattgcatttcttctatcactctatttatatgtcccaaaagcaaaaataaatatatactatgatgaaattatataatggctacaaatgtcaattttttttcccattgtaaaattcattttgtattaaaatactatttcatagtttgaaaaaaatttaaattgtatggcatgcatgtctatctgcaggagtctgagcgtgaaattttgtgtgattttgtgcatccatgtttatgcgtgtgattttgtctatacatgcgtgcatatgtttctgttatatttcatgctgttttatacggaaaagaaatcaatcatggctggtaagtagttcccattacgaaacttgtacagataactccaaagaggataccaaacgttattccccacaacctagaaggataatgaatcactcaacacaaacaaggacaaggagaaaaaactattatattcgtgtcatccctacaaggatgtaattgatattagcataacaagacaacggaagtagttgcaaaagtagtatttaatatttattaacgcacacacttctaaaatatcaaaacatcaccttcagaaaaagaacattaaaaagacaccttgcgtaaattagggaatgggattaggaacatgataagctatctctccaattagactaaagatatgtatattcacattgagtcctagtgttatttaagaggatagtactttaaatttcacataacactgggcaatttctccttatcttgtgtgttggaaagaaatatatattttaattgtcatgtttttttaattcacattatttgccacagaacttggagtattcatgattacatgcaatgcaacatgcaatgtgcagtaaactcgccaatttcaaagaattttattcattgatcaacctactgaatagcaccaaacaacttcacgatgagaagcagcatggacatataatgcaagagaaacaaaatagtatgaatacaacatagtatagagaaaattttcaaacaaacctgccaaaatgtgtagtagcctctttgatcgtgagcatatatgaagaattcatttccgggtccacttggccagaactgatatggaaacttcaggaaaattttggtgtacacggttacatcacatttctctatggcttctaatttccatctctgtgtaattattgaataagtcaaagttttgcttagtaaaaccaactaaaactaatgtcattaattgaagggaaactttgacaactaagcaggctcagacaaagtgtctcaatgatgttcgtggggaagatccatttataaacagttcttttgcattataagtgtctcaacaaaatagacatatataatgcaaaagaacaacttcatatgatgctatttaaattctaaattaaatgcaaagtcacttggaggagtgctcctgttatgacaatacattctctaatacttataattaaaaaaatatcagtgtgtgaaaagagcacttttaatgcattttttcagacaacaaatacttaaaaatttattgttataatgcatgtgtattatgttttatattgttataaaaatttattgtcgcactatatgtagtatcataaatgatttgttgatcattgttaaaaattaattaaaaaattacactataagtagcttttttttacattatccatttattaaatttaaatatttgaagttttttgagatatttcataaaaaaaatagggttaaacatatttttagttcttatcgataaggtaatattcattttttagtctctaaaaattaaatcgataactattttttctcttttatttactgaaatgcattatatataatccttatttttataatcaataaattaaaagaagatgacttttttaaaagacaaatcatgtaactaaccaatttttataaataaaagataaatataataatttattttttgaagactgaaaataataatttatgtataacatatcataatccacgaataacaaatactagcaacaagttgttgatgtatcaacatttgatcattgatcttgaaaaattatctcctgacatcattaaccatagagtccagtttaatgcaaggcctagttatccttaattgtattaatatatttgattttctaataacattagactatgggaccatgaccaattaaatatcttaaatagaatggaaagaactacatattagcaaaagctcactctagactagatattccatttaattttattaacgtctagaagatgaaaatactatcaaatacaaatgtacgggcacctgtacctgtactagaggacaaaagaaaataaagtactgtactatagaggacaaaagaaaataaagtatagacaaaacatacgggtaagggtggatggaaggcaacaaggttgctttggagaaccccaatgctaacggacacaagtacgtaatttgcttcataaatgcaatcatcctctgttatcaccctaacgccacttccccgatgctctatttcccggaccacctgcatgcacaacatcagtgcaaagttacatgaggtaagttgaattaaaggatgcaaagcaacaacaaatattattttatttctttaattaatatctcacgacacttgttagtataggctgttattaaaagatgttttaagagacatgcaggttctctgaaacacacccatgttattatttaaaatgaaatgacaaagcaacttaacccttgtaaagcatattttatttttgcttacataacaatatcttggacactcattaaaattctcttatgtataaaatttatttaacatgttaaaaatttataaagaaactttattttcactaaaagttttcaattttgaaatcaatggttaacaaaaccattcttttactatacaaacaagaaatcttattcttggtcagaatgtagcgaaggaaatttcgaacaccatgaagatatatttgttttggtgaaaaacttcttaaactaaaaattaaaagttttgttaaatttttttaactttgcttttttattttccaccatgattaattagttgctcaacatttacagtaatttaatttgtgtacaaaaatctttgtaataaaaatattactaattatatgtattatttgtcattactaaatatacttgaatatttcatcaatagttttatgtttgaaagttgcagggtgttgctatcactttacctaaaaataaaatgtataaaatgatactttagtaaataatgacagtaaaaaaagtttgatgcaggtgttcataaaacattatatttttaatcaaatatttatgatatatctaagataactcaatagacaagtgtatcctgaagactcatcatgcctgtaactcaaaaagtgtgtcaacgagcttaagtaacagaaaaataaaataaaatagtaaagttattgggttacgatgtggactagagtgcagagaagaagccccggagtaggcgtataaagataatgtaacggaccaacccattattaccctgaagaaagtaggttacaccaccactactactagtactagatggctcatggactcggcgcataggcattgaccgatagaaatattatagctaactggttcattagataaaaggtcaagattaggaagcaagcaacattacgtacatggttgagtttgagacgagtgtccagtattttaccctcagatgtcaacaaaaaatcttcagccattttatataccaaataatcaaaacctctttcatccgcaaccaaaaattccctttcgccaaacgctgtaaaggtagatatcggtactgcctctgcatccacaactttcacagtttcagaacagacatccataaaccaactcactatttaatttaattcaaagtgagttgcgaggtttgaactgacctgccatttcaaaatcatggaggatgaaatcaattgctagctctaatggcgacctaataaagcgaaacaaaaaagagttcggaaatattggttcatgttatttatggtcacaatcacaccacatttattcaccaaatcgttttgtggttgaaaaggactagtaattgcacttacgaaggtggttcagttgttttggagctattgccttggcgatcggcttcttcctggttcgttaagtttcgaattgccgagtccacagcttttttgtacgagtccgcagcgattccactcgaaaatatctttccactggaatgaactcgtcgtggcaaatatatttcaggaaaaaatggttatacactaaccgataacaggaattatggaacagagcaatcggcagagcaacagaagcaaaaaaatggaaaaagaaatagagtctcgcctgcgatcatatatgttgtatggcacattcgtgtagtcagagaagcatgttcgaaggccatattcagcgacgagttcccaaattggattggactctttgccgccaactccgacaatccaaccagctccgagttcgacggacacaccgccgaagttttccttccgaatcctaccgccaatacagtttgaagcctccaggattacaagatcctttacgccattctcggccaacagctttgccgcagagatacctttcagaaaggaaaacacatagttattgatatggaaaaatgaagatgcggagagagaggaagaattgtagcgatggtggtattcaccggatacaccagcaccgacgataatgacgaatgaaagagaagagttgaagagtatggtagagagagaaagagaggtataaatatatagcgggagtccattaacattttctatgaaagaaaggtattattatattgagtacttgaatgctcatgttcctgcttacagttggaaatgtacatcacatcactctactaattaattatttgataagtataaactgacgccacttttccaatgttgtattccccggaccaccaaacatcacctattcacattattcatgtttttgttaaaggatgcaaagcaacaatgaatatttaattaatatatgacgccatctgttaacataagttgttattaaaaggtgttttaagagtgagatgtaaaaacacaaatacgtgttattatttaagatgaaagacaaaagcaccgtagcccttcttaggctattaattgctagtgagtcaattcaaatagtgcggacgattacagaaatttggagtccgggacctactaatttatgagatgtaaaggaagtttaaaagattgagatacaatatattatttgatgatcaacttgtttcttgcgtggaagaaattcatttggttaaccatccattgaagtagtttcctaattactggcacgaaaaagggatttttatatttgctggttttatttttttagatcgattttaaggggtgtcaaatcaacatcggtagatagtgagtatatttttagaatagttttgaaatcgatttagaaaagttatcttttacacgtagcgaaaaatcgttgtaaaagtactttgtatattaattgtagcaagaaccaatgtaacaaagttatcgtgctaggattttaaccagccaactttgtttgtatatgtttcaatgtgtttggatagtctctatatcatactaaatcatagtgatatggattaattttgattttgatcaaatctgatatgtttgaattgtttttaaaattattataaaattaattatgatgctaaaatcataatggaattgaagcaagagtaatttttatttttatcaaaattaattttataattattaatttaatttaaaattaaatttatcggtgtggttccacatgcttaaaattttaaatggtggccttagaagatagacagtagcaatgaaagtgaagatgaattgttaagtgtctcggaggaagggaattaaagaaaatgcggaaaaaggaatgaaattctgagataatataaaggtgacgtctatgctataatctacatgcacatgtgacttaattgatatctttaaagcatttttaaggaataaaattataataaatgattatgtttaggaactaaatttaaatggttctactattaatcatacaaatgtcgtgttatgttggcctgaacattaacattaatagaggtactctaaaaactaaactaacatgattgacatgtgacagtttgaataatctattttgaattttcttaatttcaagaattaatgtaaccataccaaacactttcattgatgaaataggtcacttatcctaataataacaattacgatgttatgctttgttgttttttattatcaatttttattatttagttataatttctcttgtgcttttaattatttaatggtattaatagattagaccgtataagaggagaggataatatgacatttacatctctcaaaaaatgagagtatactttaatttaatttaatggtgttaaattaaatgaattaaacatatattttaaaagagtaatgtcagactcgattatcttaaaagatggaaaaaattattttattttttattttacttctaattaattgaatgtatgaatgattaaccttcaatacattatttgtttttttaataaatataattaagatttttaactttttaacaggatctcgagatccttaaaaaaatgagactttgagatacttttataaattttaatctttagaattgattatagaattaatcttcgagacacttttttacacttactcgggacaatatgtatattatgacctgcttaatttctcctcctcatgaaaaaataacaggaatttgatgcaattggcaatccagtgatccactaaccgatcaccaaaactattatagatgttttcatgtctctaatttaaatttgaattatgaatataatattgaaatatattatttgacacatttttaatgtattttgattagataaattttgagttttactaaatatttttcaatcaacgagtcttacagaatataaaataaattttaaattgtttaatatataaataatttatcttttttatatgctaaaatgaagtgaatcaataattaaataaaagataaataaaagaaaaaaatagcatacttgtttcgtgttttttgaaaaattcttttttaaaataaaaatgaaataaaagaatttatttgataagactcataaaagtagttttgaaaactcttttcagaacaaacatctttattttagtttttaaaaataaaaattcagaacatttataagttgttttatttttatttttttattacttatgttcttttctttagctttaacatctcttttatcacttttactctctaaaaatttgtttttaaagaagacaccagtactcggccttttaattacgtagtaaggtaaaatacgtcgttggatcagttacgtgtttgacaatatatgtgcttgttattcaaatattatgtatattagtttactaaaacattaaattacggaaactaaaaatacattttttcaaatatgttgcgactttgtattgggtgttgttcacaaccctttccgtaatatacagtacctgtgcttaaaatgcaaagtttggtgaggaattaaaccatgatgcatgactttgacaaatggctagtctcatcagtggcggagcttcaaaaaaaaggatcaaagtaattaagattatatataaagatgtaatgattttgatgatatcatttcttatgaatttcctgtttgcttttttcctttttgcagagaagcactcgcataaaagatactggtttccactaatagttgttcttccaacgtgaaattttcttttttcttttttagtatatgaagtttgttatttgatatttaattaattttttatttgaccgatttattttaagataaaatgatatttctaattataattttatatctttatatttaagttaaaaattaaatctaaaaatttaattaatagacacgtgtcgcattatttgtgacgataattttatttgttcatataatttttttcctttatataacttataaattgtctaagacattcatttagagccttaaatacattctgttttgatcacgattctttagctattttttttttacatttttcatgattttttctcttaattttataaatttttctgtctatctcttttataaagaaataaagtttttaatttttaaagaatttttactccattttttcatgttaaaataaaataaaagttagtccaaatattaatttttaattgaattagattagaaaagttactccaaaatttactttttttttaatggatggacatagtgcttataagtagtattaatatgttgtgcttgtgagttgtgaaaacaaatgagtgacacgcctggtgggactcgaacccacaatcgtctgattagaagtcagacgccttatcgattaggccacaggcgctaagtcactggaggccgctacagtaactaattatccgcatacaaaactctggatatttgacatatgaaacaattttttttttttacaggaacatatcaaacacaactaagagtgggtttatatataaaacaaaaatataatttattttacgttaacattaggagtgggacttatggcttggcttccttctttagtagaaaggttggacttgaattttaaaataagcttatttatttaaatacactatatttaggcttatcaaaaagtttattaaacatgatagattaggctatttatttatgtaacttaataaaaataaatatgcataataatattgttaattaaataaatctataggaccaagatcagattattaagaatttaacatatatatatatatataaacaatagtaagactattgcatagtgacaacttaagtgattaagttaatagtgatattaaaccactcataattttatataacttattaatatttttatttttttcctatcacattataagctttattatatataaagggttgagagtcacaaatattttgtcttctctgcaagtattgcgagtggatcaagttctggaaacgagctaccaaataacggtggaggcagttttattcagaataatgtgttcttgaaggagaaggttatgcagagcaaagaaaaagctcctgttagaccttctgttgatttgctaaagcataatctagctaggataaagttcaaggatgacaatagactcaaaagtgatcattgacccttttgtctttaaaggactatgcttgccatggcaagatgcccttgtcatcaaagttgtggggaaatgcatcaactttcaaatgttgcatgatcaagtcaccaaactttggagactcgttgttggcttttgaaggaaaataatacctaattataaaaagaggtatagtatttataggtttgaagtggtaactgctagattaggtgcatatctatttaggtcaaatggttgagggaaccattgaatgactatagttcttctagtgatctatagttttttcatgtaacaaatgaggaattgagaagtttcaaaggtgatactgaggtggtgtggttctctagttgacataagtgtacattgaatcatagactactcgggctatgggattgagttcataaggtttgtcctatcctggtcaagattgggattttttttttttataaagctactacttatttttttataaaaattattttgtttaactttttaagaggttttaaaaatatatactttaacttaacttttctttttaagaaaaagaaaacaatgctaccttactataattttactccacatttgaaaatttttaatcaagaattgaggactcacttagttggtaagattgagtctattttttttaaatatttttaaaaataggcttctctaataaatttcacgtaaaatattatcataaaatattattatttttatttatttatagaaatcgaagacggatatcaataattttataataaatcaataactcacacacactaaatttaatcaattgaattatacttccttattaaattataatgttttatgaagatatcattatacttatttatgtaaaggcgagttgattaagtatacacattatttcgtattcataaaagaaagtatacacattatttcgtattcataaaagaataatattataagggatgccatcttgtatgcaatcaatcaactcattctttgttctgataagtttaataacaatttcattgaagaataatattttatgtgaaatttattttaaaccataagaatttttaaaatctattaaaaattagattgcaattttaacaattaattataagtccttagtactagattaaaagatttaaaaagggagaacaaaacttaaaccctaataagatagtactgaatcattagctagcttagaattgcaattagtttaaaatataatttgtattgatgcgacattcatgtatacatgtaagaattaattaaaagattgtttaactcgttccttcactctagtatattatttttcaaatttcttcacatatgactactccacatggtgatagattgagttttgtctatacagtaatgtagtcaaaccttattgtcctttaaaattgatcaatcaaattttgttgacttattcattaccattctaacataaatttttcatatctttagatcgtattcttaacattgaaatcaataatattgtagaaaaaaacatgcatgattgtttcgaggaaagaggccagcttgcaaacatgatgaaatgatgaataaagttctacatgtatggaaaaaataaataattcgttggtttaaaacgtgtcatatttacagtcaaagtcaaaataaatatataattgattggtttgaaaatatagagaaatttttaaacaaataattactaattttttaattgactgatttaatttatttctgtatttgtatataacagtacatgttcttaatgctttatataaacaagtaaattacactaattacatataagattttatgaaattaaataaactcttcctgcttttatctcttctacactcttctttattttattttttttaaaatatactgcaaattgacacttcttataaattacactaataacttcttttttttttaaaaaaaaactttacaccattctccctatataaaagatgttattgtaaatgctaaaaaataggagatatttgtataattttacaaaattttaaaaatgattagtgtaatttactctagaagaaatattaaataaaaataaatatttttttatgtttaaataattcatgtgttcattttgatatatttttaaaaaaattattatcaaatgttttaaagaaattttataaaattattaatttctcaacaaacatgtacttaattgttcgtttcatttaaaagaatgagaaagaagtgaaagtttcatcaatttttgagatgaaaatatgtgatatatttggattaaagtagagtataaaggtatgaaatccacattatttaaatcaaaattaaagccctcgaagctcgaaatagtagcttcttatattttctttaatcaattaacgattttttttcatactttgatattcgtaaatctaactaattttttttatagttttataaccaatcccccccccccccccccccccccttatagaagggttgaattttcttttattacaaaaaaaaaattaatttaaaaaaaaattttaactttgtttgttttgcctttttttttccctgaggacaaatggagcttatatattatgggggtaactatcataaaaaaaacttcaccctccaaaatgatcaattttagttcattgatgtgtttcgatgtggatgcagacttgacccggaagctatgaatcattgcttctgctaaatatatgaattcgacgtaatttggttgctagatgtgtgcatattaaatgtgtgtccaaatacacttgagacaaacacattgtatctctcaacttcaatttccatttttgtcgttgagtgcaaaagttgtttatatgtacaaaataatgaaaacaacaacaactatttctcttgagaatcactgaaacatagtatgaaatatatggacgaaattaaattgcgaaccaattgtacgcgacatatataattccctccaagttttatcatgtaaaaccagcaacagataatcaggttaatttatcaagtgctggtactattccaatttattcgtaccattagcatataggaattctgttcttttatatacatattcacaaactcaggttttttcacacaggaatgttaatatgtcggtacactaataataaccaaaagacaacaagttatggcctataataaaacgggcatcgaatatattgcggcacaaatgaatgcgactgaacttgcacagcttaggcatttgggagcatgaataatgacatcaaagtcaagtggttcatctcgtgttccaccctcttctatctctcgtgttgcttgattgtgatagttaattatcttaacgttttataacttttcctggcttcttttttcccttaggttaattgtatttttttttaattattaccatgatattgacatggagtattctttgtcaaaaaaacttaactaattgattttttctcatacattttctctttccattagattcaaatccaaaattttgtttaagagaatggaatacagtttcagcgtagaacaatatatttttatctttaagagatttttaatagacatacgttattaatgtaaaagtttttatacatttaactaattagaaatcattcttaaaattatttgtaattagatgataatataaaaatttgttggtgtacatatattattttataggtccttctaattttgtttttatacttttaaacttttaaaatgatttcttatccgaatcaattgtaaacttccaactatttagatagaaaatgatttgagagttttaaaaagtagaaaattgatagaccattaaatttgtgtactcttaaaaataaatggacttaattgattaaaaatatctaaaaagattaaaatagcacataatctaaattaaaaaggagcaaaaatataattaatttttttataaaatgttcacaacaatgtcaatatgtcatattctcttataatatctccacaattcctttaataattttaaaaaataaaaattatttatcatttttatttaataaaagagattaataagacaatattttaagaggattttaaattattcaataatttaatagggatacctgagaaaggacaaggcatgctttaatctctagttaggtatatatatgagaaaaaacacatgaaagggttgagtgacgtgcaatgcatgagcaacgggctcataaaggcatatgacggtgacccctttatagtactttttggttaatgtttttcacccaccttgactctccataacatgtccttaagaatttcatttgtatggctcttcttttagacggttaaaaacagaacatgtgctactcaatgctcatcttcaatgaaatcaaacaatattcctcttcttttgtcgctatgttatgggctaatttttcggaaagtaaacatgtataattatttagataaattatttatcataattttatacaatatgtcagtttcatataaatttaaatattttacataaaattcactcaaatattaagattattagagatgattaacataattttattaattttataatactcactcaaatattaagattatatgagatgattaacataattttactaattttataatacttaaaaatattatatttatgatataaatttgttaaacaacaccacgttatctgcttcaagaaaaaatattaaacaatattacttaagagttaattcatgtaaacactcccatgggatatactctaatagaataattgttaataatatattaatcacatgcaactacttgttatggtctaattgtcttgtttggttttacatagatagatagattatttgatatatattggtttaatttctctaaaagctatttatttaaataaaatttcatttaaactacaatacagtatcctcttttacgtatgaatctcactttattcacttttgacactcgacaatcaatataagtttttatcttcatttgacatttttgctgataaaacgacatttgacctctttggtatgatgatccatttctatatttagtatatagttgcaagtaatggatgatgcgttgttcacaagattaattagtttaattagatttacatcattttatattttaagataatttcgggccggcgaaggattataattaaaaaattatttaaatcctcttgtattagggtgtattagggtctgtttgttttcatgccagaacttatacttttgcacaaccatagtccaagttttagattttaccgatgttattaaatactaccaatatatatgcacacacacaactgaccttataaattatgataaaattttcccagacaaataatgtcagtgtctaaacttattttgctttggagaggaagagttttattgtattgcacacgtaaaactaataaataataactaatatttatcgattagaaaaaagttatattaactcaatcactaatgtagtaggaaatttattcattggttctacactttaaacgaatgaattgttgtttgaaccgattaaattatacataaattaaaaaatattataaatatgatattagaaacatttatgattatgatataattttttcaacaaaattaataaatcaatatttatcgataaaaaatttatggtataatggatgatgttatcttagttattaagtcacaccatcaaacctcaatttacggaattttgtattaacattttgcatatctgtatttactctgactctataatagactcaaactggtttttcaactgggctaccaattgaaccagttgggttgattttcttgttcgaatgaataaagtgaaaatctttaatttgatcatcttccaacaattgtgttgttaagttagtcctttaaacaaaaaatctaaccgtcattttaactctaaaaattctgcaaccaaattcatttttcaaaaaattaaattatatcaatggtattacacggcatataacaaaatttcaaactgagattgcatctgctagaaataattgatcagcattcaaaaaagtgtgtgatacgaagaaaccaaaaaaagaaataaaggggaaatcaggaccaagattcaggagatcagacaaaggttgatcttgactagtcatgagacagatcaaatcatgagaaaagggaacatgatcaatgagcaattgccagcatctcccatcccagtttttctttagggggcctccttagtttgatcattatgaaaatgcaccatgtctgagactatagaccatgctgactttcttatgcttccacttgttaatactctaaaattgtcctaaatttcagcacaagggaaacacactcacatggccaaaaaatattgcaaagtagtatataccttgcaggcttctaccagaaaattgtagaaattggtcaatttttaaccataggttcttgttttccactacatgggttgttttcgactatgcacgacacccaaccatattttcacatgtcaaatgaaacaaaagtcctccaacatatccgtcttgtttaatttcaatgtcaagccgaattcaccctggctccaaattggaaatgattttgtttttaaataaaacatttttttaaagaaaacccagatagcaaatgctcaaattgaacataaactgcagctgttcttagctttaattttgaaaattgttgccacaaaaggcaccgatctgctaatgtgcaagacaactaactcataacagacatatttctatatggaaaagggattttatattgttattgctactattagaaagtctcatgtggtccacctcaattatggggtggtggtttgcataattgttggactacttaatatcatttaattttgagatgaaattttacatagtatgagagtccataacccattcctgtgtcaattggttatagatgatagcatataacagctacatcacaaagtttcaattacatagtaccatgaaggaaaaaatacattgtaaaaacttggattttaaattgttttaatatgattttgagatgaagtttaacatgatattcaaatctataactcattcttatgtcaattaagatgatgacatctaaaaagctaaattacaaagttttcattttttttatcttttatcggtgttaatttgttaatttttgttaatgacagaaatttgaaaccataatttcttttattttttttcaaccagtaaaccaatcttataactttccattacaaagtttcaactacatatataagattgagttttatattgtttcaattagttttagttttaagatgaaatttaatgacatcaaaatacataacccattgccatgccaattggttaagtagatgatgacatttaacagctacattacaaagtttcaatcacatggtaaaaaaattgggtttgcaaagaccaagcatgtgttagtattatccatgaaaaagggtgaaactcaagttcaaagaaccaatttgtgagactggctggtgggcattgacaatggaaggaaaaggtcaggaacatttagcggcgagttgtcgggtttgtgtggcaaaagagccatttggtttggggttgtcatgccattggtggtctacatccttgtgttatgcaattgcacgacattggcttgtgtcaaatgaattgtcccgttacaggatttttgtcatctttctatcttgtttacataaacatatggtatttatgtgggtatagataagaaaaagatggacacaattttttgtcaaattaattcttcatagtttataactttgatcttgtacgtacgtaaagtgttgtgtgatatacattttgcatcacgtaaatcaacaatttataatacatcaaagctaataattttgtatctttcataacaggaggcttatataagagattttaaaaaaactttagatctagccaaaacaagtccacctgtgagtggtctttaattattttattttaaacttgcaaatataacctagaaataactactaggccaatgttattctcactctttttcatttagatttcaactcccaacgttttctactacccctaccccttttaaaattcctctttaaccctacccttctcccttgcacctgccatccatccctacctctttctccctctcctttgctcacacttcccacccccttgcaggagttctgtccgagctccattgtatgtgaagtccactctgaaacttgtttttgtttatttttttgtgctaatggatgcaacgaaaaacttgtttgtgtggtgcattagtacacaatggaaacaagtttctgataatgtataaaaaattaattattttcttaaaaatttaattattttcattacttgttattgaactttcattcctttttactagtgcaggtacaatatgccgccacatatgtgattaggtggtcgtagctggcttgggagttctctgctaagagagccacaaaaattcttgactccttttgaaattttcttgataattgctgacatataagacacaatatcacaaaattgatgcctaaaaataataattgataagtgtactttgtacaataataacaatagactaaaagtccatgtattgaacccaaatgacaagttgtgttcccaaataattaattttataaaattaagcatctaaagttaaattaaataaaagataattgtgatcaattgtttaatttagtaaataattaagaatcaaagatagaagagttgatgtgaaaacaattataacaagcaacctaggattgtgatttcacacttaatccaattttttccaattctaactctaacaaaaatccaaatattatcaattattgatatttccaaattcaattattaaaatttagttatggcttaataactctctttgccctaatcaatactcggttgatcatagaaatatcatattaggtcaaaggattaagatcaaaccaagggtgatcaatcaattaatctactgaaatttttcctaaccagtttgatcatacaagttatgtaaaagcaatctcttcctaagtcaatcatttaattacatgtagatgattactgtcatacaattgattaagatttgaagtgatcaattccgaattaacaataaagaataaatgagagatttaattgatgggaaaacattgaagttttcatacaattgattcaaatttggagtgattaattccaaattaacaataaaaaataaatgagagatttaattgatgggaaaacattgaaggcttcattaaaattagaaaaggggtacaaaagtatgattacatcataatcctagaccagggagactaattgcacatgaccatgataaaactaaaaatctcaataaaaacatagacataccaaagagaatgagacttggtcagaattcgtttcaattatgttatgtgtgatcctttgtagctaagaactcctatacaaccctattctttcttagaactcaaaaaatataaatagaacaaaagacactaaaaaaagaggcaatcatttatccttgtaatttttaagtgacaagtgatgcaagtggaccatgtatgtacaaaattaccgtgcacacgcatataaaattatcacaattatacaaaattaccatgactatgatcatatgattggctccaaaaatccaagatttttagctcttttttttttttttataaaacttcttaagcacttgtctttcacaaacttatattaaactgtgaattttaccaataacatatatcaaaatgcatgaatataacatggaaactaacatcgaaatacaatctaatatggatttataaaaaatcttgaaataaaaaactcccaaattattttgtccaatttggtaaaaaattaaaataaggaaaaaaaagagaaagaaatggattcataagggatttaatttttttaacattattctaacaaaaataaatcacaatatgatagttacgtatcataagtgtgattaatcccgagcaaattgaaaacacccgtgatctttgaccaatgaaaaagaaacacaatatgtatcaatcttaggctctaatactaattaaccatttttgtcaaaaatataatgatgaacaattataacatctttaccacacacaaatctatcaaagaaggatttaaaatgtatgagccttggaagaaaccttaatccatgtctacaatcttgatttcgtagttgttgcttcaatacaaaacaattgaaaattttgacttattggcaacatcttttccttaatttttttaattttcaaatgactaatagtgataacaacaaatcaataatagtgctcccttaaaaataggaagctatgactggtttcttcaaaatttaaagtatagactaatttgtttgtggaaggagaaaatcgtgcatagatttattgtcttacaatcgaatatgaattctatgttttacttttaaaaattcatgtattaattgaattactagtataaaattatcattttatagatagaaattattttcaaaaactatttataatttttatggttaacaccctcctaacgaaacgttggtaaagattgcttaagggtgatgggtagaggaaaaaaagtcttaagatatatatacgaggattttcatgcccgcaagcagtcatctataactgagttaatctgaacaagggtccaattaataagtctggattcatgaaggctagtgtttattcctctagggcagcttatgtttggctgcaaaatcagttttgaacttcacatagaagattatatgaaattaagacttcggaatattcaagaatttttgtaagcgtccaacttcaaagttttagttctgatggcagattttgtaggacaaaattcctactgcaattggttagatttgaatgttttatgtgataactgattaaaagactatagcatttgctgcttactttgtaggttggcacaccaagtctggactagtgagtatgctttgtttgacatttatatacaattctttctactgatgttaggactaatcaaggctcatcttatagcacttggtctctttggttgaattgtgatgggattatcttttaagaattaatgagtcttttgatttagtagaaatataattgctaggccttattaaaaaaattcagttagggttttcctctcaaataaatagatatctacattttttttccagatcagtgcattagctcaataaaaaaaagtaaaaaagtcatgtcatgtccattaatccttcttctaattgttgtaatgattatcatcaattttttatatgcaaaataaattaagagtacacaaggaatattctatttcatataaagtcacttcacaggaattccatcaacgacaaacatttatcaatatataatttaataattatcattaaattatttactttagatcactttgattattaaatcacttcactagctgtagctctggtttcatttgcagtggtataatcttgagttgtagaatccttaaactttgtcgtcaacttgcctctcagaaagccgcacgcactgaaagggaaaccaagtgtatcatcctcaaatcaaatggctcagcttggagtgacagtgaatctacaaggaaactttgtcttaattaaacggaagtttccattggtattcactgatttgctgagcaatttgattatatgctgttccaatattgttatacctatggaattttaaaataatacatcacatgtctattaaaatatatgagatgaatatcttggagcttaattgatttcagcggctatatttatatgtaattaatctaatattattctttgcatagccagttgaagatagtgtcctttcttttgaaagattctaagaaatcacgtggatcgtactatacttgcaagggcaagtagctcatccccagctatatatccatgcatagccttacttaattttgaaaggacgcaattctatatttgcaagttggccaaacttttaggtatatattaagattacccatcagatggagattcttaattttttttttccaacaattaattaatgactgaacactagatgtttaccatagaaaatttccatatgtaattgttttttattttaaaaaatcacatttttatatagtatcaaatttatatcttaataggtcacattgcttttatgctgagttttaaatatatgatcttatattcttattaatttctcttaaggctatgtgcatgcatgctccacaatcatttctttatatgtgctacagtttcatttgcaagggagagaaaaaactataatttgggtgtacattggtggaaaactaaattgtgaattctcatgaactaagaatcaatattgaatttggttttcaattagagtgaaaactgtaattattctgttgttattaactctgctaggttctcgaagaactttttaattaacgatcaagaactactatatttgaattcaacacataataaatgaatgccaacactgactatctatttgaagagaatgaaattatgtattaatcattttatcttactttaagttgaacttgattgtctttcatgaaaaatcttattattcctacatttaatataccattccttgaatatagtttctattattattcctacatctaatatacaattccttgaatatagtttcgattaatctttacagctaatcaaatattattaattcttttatgataaagaaaaagatttaaatatgtgttacataaaaattacataatgaaaattttctcttaatataaaaaggtgtggtccagcactatttaataatttctcttccgctacactattagatattgtgtattaacttatataccaaaaaaaattgtgttaactctttttttcttcgaatcattaaataccattcttcccacatgaattttcaaacttggtcatcctattgttaaaaagggcaccatacatggtggggtagctaaaggtgtagggggaaaggaaaaaggcaaggactgcactacgacgaaagtgcaagaaagtacatgccttctgattgtcaaaatttgattaaggacaaatatatcaaaaactccggcgggtagtgatattaattgagcaatgaaagatctacatgcaaagttaatgcagcctataaactaggtgcatggctttggtaagatgagagcctcccatgatgagagacaatcatacgtgccctgttgttttcagctgatgtaattgtttgaaagtcatgttgaataaacaatatatatggtgttgttcctcaagggtagggttttttgtcccttttgttttgagggtatgaactgaactccttaggtcccatacgtattcgatatagtgggtacaatgcttgtgacatgcatgtgatgaagcatgagcgatatttggtatctttcgttgttagtttatttaatgacccagattttggtcaaacctaatggaagtgggttccatttcaagtgaagaatagaataaggatatcacaccccttgccccccaatcgaatcggcaattaattagtttctttattgtttggatattttgcaaatttaataatgtttgcttctagcttgcacttgccaaattgagttgccaaattgaggtatcagtttgtgttaatatatatatatatatatatatatatatgatgaactttctggaagactaactctaattctagtaattgatttttttaaatttaataattaagattacctaatttttacaatcattaaattcaaagaaataaatgataaaaataagataaaattattcttagaataagttgatcctctctctctctctctctctctctctctctctctctctctctctctctctctctctctctctctctctctctctctctctctctctctctctctctctctctctctctctctctctctctctctctctctctctctctctctctctctctctctctctatatatatatatatatatatatatatatatatcatgacttcccatattttataaaagtgaaacatatataaagctagatcattagatcttattttaaatggtcaacattaaaatacattatgagtttttaaaaaagttactataaaagcaagtttcatgataatgaactaagcaattttgatgatgccaaaagtttaagtaattgattcaagattcaagagaagaaatcaagaaggaacaagtcaagacttcatataggataagtattaaaagattttttcaaaaaccaaataacacaactttgttttacagaagaattttttcaaattttctaaagttaccagagtgattattctctagtaatcgattaccagttgacagtaatcgattaccagtgaccagattggttttcaaaatgttttcaaatgatttgtaacgttccaaaatgattttcaaatagtgtaattgattacactatattagtaatcgattacaagtgaatttgaacgttggaattcaaatccaattgtaaagagtcacaacttttcataaaatatattgtgtaatcgattatcagtgaatagttttaaagaaaaagttaagagttataactcttaacatgattttctcaaaagtcataactctttcaatggtttttttttaccagacatgaaaagtctataaaagcaagattttgacacacattttacaagcatccaaaaaacacatatatctttcaaatcttttttgatcattgcccaatgtttttctttgcaaaaactcttgccaaaaagctttccaaacttcagtttcaaaactttgtttttctgcaagtggaaattctgcagaaaacaaaaatgtgttatcttttcatttcttctccctcttgccaaaagaattcaaagaactaatcgtctgagaattcttttgattcttcctcctccctctgaacaaaagattttaaaggactaatcgtctgagatatcttttgtttccctttacaaaaattcaagggactaatcacctaaaaattctttgtcttaacacattagagcgtacatcctttgtggtacaagtagagcgtacatttacttaggttgtaatactgagaacaagagaggatacatctcttgtgaatcagttcaagtggagcgtacatccacttggtgtttcaaagagaacaagggagggtacatccctcgtggatttttgcttgtaaaggattttacaaggttaaaggaaatctcaagaatcggtggttgcttggggactggatgtaggcacgagttgttgccgaactagtataaatcttgtgtttattttcttcttccctacactctttatttttttgctgtatactttttattttcgctttacttttgtctaagttattgtttttgatctttactttctcataactttgtagtaaagtctaattgaatcctagtaatattaagaagaataaatttttaatgagtcaagacacattaataattaattcaaccccctcttaattattttgaggccacttgatccaatagttacaaatttttaagtagtgattaaataatactaaatcttgattatttatatgtgattgtatagtctatatcatttactattctcattcttatatatatatattttaaaaggtttattttatacacataagtataattgataaacttgttcaaaaaaaaattcgtgtgtgtgtgtctcctcacataattgaaacatgatttttaagtatttttctctttcaaaacactcttatttcttcccttcctcccctctttgtgagtgccactttagtcctctactccgacgaagagactctcctctcgctcgtattcaactcaaccacattgaaattcgaacaaactcgaggcctattctcaacctctacttctccctcactgccaaagattgcaacatgaacttcttctccatcgcatattactcccttgccctctttgtcggctattgcaactgccagcttggcttcgttatcgtgctggttgccgcatcaaggcgtgcaactcctcctatatatacgtatttgcaggaacaatagaaatgcagattgacaatctggatttgaaatgataaagggatattgtgcgaattattatttgaaaaacataggttgtgtatgtgtaatgtctataaaaagcagaggattatatataattgttatacaaggatatacagagtcaatgcaccaataaaaaattgaaaaggctttcctacttttgaagacactcaatatactaagacctaatctttgtaaggtccatcaacctaactcaatccacttgttcaccattctcatttttttagaaatgttactaaattacactttttgtagtatctttaacaaacctaaggtgtaacttattcaaaaggaaaaatatgagtgtattacttgaaaaatactacttgtacacccaaaatactaattgacacttattgagagagaaataaattaaagagaagaaatagagttatgatatttggtcactcataaattaggaatactccatcaattatacttctcatttctcttcctatcatattgtgaatcttatcaatcacttatatcttttctttttctatctctctcaatatgtatacaactaaagggtatccaaaaatcatttcctgcatggaaaataaatataagtattattggtgatatgaaatgattggaaaagagaaatagaaaataatgatggatgttaactagataagtttttaaaaaaattaggtttccaaatatcatagctcatgatattatttatcactcattgttaactatattctcattttttagaagtatttaacaaactaaaattttaaaaatatttttatcaaatcctaagttattacttatttacatattctttcttacaaaaaaataaaaatatattcacaaacacccataaaatctgcaccgcgttattttatgaagagctatatcgatccaccatgaagtaggcaacatttatatatatatatatatatatatatatatatatatatatatatataaaatgcaaaatgacttccacttccattagtagataaagatgcaaatgggaaccaccttttgggtttcgtagccctccatatggcatggctaaaattgtggccgtttatatagtatatataatctgtatgccaagaatcacgccatgaaaaatccaaatgcaacgtgtaaaatgtcctatatttattgttagtcaccagtttcatgagattcatgttaggtcatctcaggcaatattaattcatcaaggtctaacatcgacagcacatcattcaacatgaaaacgataaaagtattctaagttggccacagtaatcggacacatggatatatactctatatcatattttatttttaaaggtcttcaaacaatgtttaaatgtacccatataatcaattagatgtatccaatacatttatacaaccaagtggtcaaagaaggaatccctaaatatcacgttcgaatattctaagcaataattttcaaaagcaatcgattagtttgttaatgttagagttgcatatatagttgttcttcagctttaagttacttgattcatcggttggtgtagtttgacacgtttctacttagtctcaaactcacccgtctatttgaagtgagataaatgtatcaacgtctataagtatattttgagtatattttttttaaatcttaaattgtgacatcatcctctcttcctaaattttatgtaaaacaaaaaatgatagaactataacatgcacatattcttaattacatggttaaagtgatcgatcagatgcgtaccttactaaatttttaaggttttttaattctgtgaaatttttatcaatgtgagatttgtcacgacactttgctcaactatacagcgcattaactttgctgcgtttccaatagtaaacggacataaatgtgtcacatgttgaaagctaatccaataagctaggtcagaattgttcagccattgagcagctggtaagtaatgaatcagtaatttcatgcatcaatttttgtttgtatggataaaattatatagatagagatgtaaaggagccagctatatagcccaagaggctagctaggcatcatcgcgtttaattacataccacagtatttggttgagtgtggaattttgtcattaaacacgtgtagcttgagagagaatcctaaggcagaaggaaatatttcagagaaaatggaccatttggttgagtttcagaaaagaaaagaagagacagacgaaactaatgacgtgatgatcgtgtttacaattggaatgtaggtgtcacattcatgaactgttaagaatctgcggcctaaaacactgcaaccatagccacgcccctgcctacgactttcaagtacctcatgactgtggagcaggatactaattaattaattaaataaaatcgaaaaatattcaagttacactccaaaaattggggtatgattatctagaaagagagaaaaaaaggtatattcgtgtgaatcaattatcataagattcttttgacttaattagtgtctcaaatttaagttctttgaatatatattattatgttaaatatttagaaaaaaaattatcattcataataattttactcgattctaataaagttacatcccacattttataccatatatatatatatatatatatatatatatatatatatatatatatatatatatatgacaaataatgtaacgaaaagtaaagagacaaaaaatgagatataaataagaagaaagaaaaagtaattatattttttataacaattatagagtacgtatgtgtttggtgaaagtaagatatactcataattggaaattatgagactatttcttgatcaaggcataaagatcaacaaatttagttgtatgttctaataaaaaaatttctatacataggttagagaattaaacctcatcactatataattgtttaattatgagcgacaattattataaaagaaaacgcttttcaagatgatgaataaaaataactaattaaattataatgttattatttaattatggattttcatataattgaaatacgttttataatgagtatgttaaaagtcacttctaactgtgtgaaccttgacaatatataaaattaaactaaaaactattattatttaatgaaaataatgtatattgaaccattcacgtatagggttgaaaattactaattaaagttaatgattttaatttgattttgataaggtataagtacatatatatgataaattaatttgttaaaatatataatacatttgattaaaggatatatatttctaaaacttattttttatgagaaggtaatctaaccctaactaaatattattggacaagtttacacatttaattaaacttcaaagaaaactttaatcattatggcataagatcttttgaattcataaatatactaattgtttttttaagaccacagatattcttaatagaagacagttctccttgaaatagataaaattattatgggaaataaaattttctctttataattaatatattatttattttttaaaaccaaaagtatttttaatgaaagacaatcctgttagaaatagataaaattatgaatgataatttttttctctttataattaatacgctattgggattcattatttaggacgaattggtcactatttttggagtgaaaaaaattatgtaaaatgagaagtaattaagaatatatctattattaatacaaataaaaaaacccaataaactcaacccaattaaatttaaaaataaatgcacctttcttttcactttttacacgcacgcttttcacctttgacagcaaaataaaaatctaaaataaatttaggttgaaaatatattgaggtaattcctatttaaattcagtgatatttaaagtgataaagttaatctgtcgtttacctaaatatacatgcatcagcaacaaaaaagacgtgctaatgttacagtttttgatgcccagacaggcagacataacgagatgacacgtgacattgtgggtgctatgtgctacgtacccaataggaagaagaaaagaaatactactacatagcaaaactgtggtatacccatttgcagtgtaataataaccataattagcaaccaaattaataacgtgaattgtggagtacgtcgtagagagactggtcaacaatttcacctctaatttggaggggtgaaacttttgagaaatatccaaatcaagacaaaagccaaaacaacaaagttaagtcactgcttcactgcttgctggagaggcagccagagccggtagcatagccacttgtttgatgctcccaactcccaagttaaggtcttgcagcaggctcaaggggcacagtaatgttgttctaggcaggtctaatcctaaagttttcaattttcttttgtctttgctaagtgattatcatacatgaatatgaagactaaatctcacttgtcacaatagtttgacatttgagttatttaattaagatttaaggttttatttttgatttaaaaataaagttacagttgctttaaaataaacagattagggagataaaaattgtttacgtgataaataaaagttttagatatcttctgatcaagaaaaatacctgaatatgaaaatagatattattttctccatccttaaataagctttatatttgaaaaatatattacaaaaaataagtattatgttaatttttaatgtaatattaagattaaagatatttttataaaattagtattttttttatctatcaattgattttttatctgtgtaaaataatttaacatgatatttattttgaaactatggaagtaaattaaaagggttttaaaatgtgaaggcaatgtaatttctgcacacatgtatattagtattagatgtaaaaactattacgcaattaaaagagattaagacaacacacgtacagtataacctttcatggtcggtggattactaaactctatgatagggatgcatgtatataagtactatttaattacagtgtgaacaattttattttattacgttctgacattgtcgatcgatctcatagtacgtatacacagaaaaatttggtacagtaaatatttttctatttttgtaatttaaattaaaatttaacaacattttctaaaaacaattttaattactaatttaactttattaaaatttgtacaattataaggtagttttaattagttaatatacgaaataaaacccacatcagtgtgtgaattataataaatctttaaccaataataaaacttatattgaaaagagtttgttattaaaattgtttaaatacttattttgagaataataaattaaacattacatggtggtaaaagaacattattttaaaataccaattcggtaacttttaaaaatcaaattaattttttaaaagaacagtgctaacaacatattcaatattaagatatatattctttattatcaattaaaatttatgataaactataacatttaagtgtgtaatttttaaataaagagtaaatcttgaataattttattataataaattttaattaataaattaaaaatatatttgaaacaaaagtagagtataatattgtttaatttttatcgtgtataaaattgttttgggtcaacaacaaccatttattgtgagtgaaattagtctttaactaagtggagttggagatacccatgatttctaactgaaaataaaaaaatcctaaattttaaaatagtatcaaagtttattttaatgattgttgttatcggactactatcaaaccatgcataaatatccgtcaatcctatgaatttcatgcttgagatgtctagttttcaatgtaaggggatgtgttttaaagtagtgtatataagataataataactctcacaaaccgattttataggattcatttagatttaaacctaaattttaagatgatataagagtttattctacggatcgttattggacctattggattatatactatgagcctgttattgaaccatccgtaaatattagtcaattccacatatttcatgattgagatgtctaatctttggtattaggaggatgtatatgctctatagtaatgtatataagtagatgacaatttttactttacccattaattttataagattgaattagacttaaacctaaattataaaataatattaaagtttattctaatgattgttgttggttctattggatcgcttcctatcatactattattgaaccacacacctatagatattcgccaatccaataaattttgccctcaagatgtcgaattctaaatgtgacagaagtgtgttagtgtttctgcatcgaatagtagtaatatatacaaagtaatgtataaatcaattttataaaatataaattaagtcaaaatcgaaattgatgtaaaaataaaatttgcaaggaaaggaggaggggggcgtgtttaattagtgaataattaaaggttacttattgagaaaagaaaaaaggagaagcggattaatgtgtatgaaatgattaaaatgacaaggaagtagtaagataacatgggcttgcgtgctgagactgacacaaagaggtcccgcgtcgttggctaatacaaggcacatttggcttaagccacttgaagtctaaccccagcgaggggacatattcagaaaggacagtatggcgtatctctcccattccttcattcatctctctcacaaaaccctattaataacaagcatagcccactgctttccatgcacttgtcctcttcaactcccaacacccactagttcactattatacctatacactctcctccttctcctccccctctcaactaataattaaaaccaacaaacatgtacactttcttaatttaattaattattttctactttctttcttcctcctcttttattttatttacctagctagttagttacctcttcaattccctcttaaatattccctctgctttgctcccatacacatatccctctcactctctctttttgagataagtttgtttagtttcattttctgtgattctcgtctgacaagccccccccccccccccccccatttcctgcttcttcttggccctccaatttcccctcagaccttgttctctcatcactcactcactcacaacaacaacaacaacaacactctctttcctctctcatttttaattattctcttcaattccttaagtcattaagaggtagctagaagtagtagctcgcaacagcaaatatttctgacacaaacatcatcacaaaagggtagtagtggacgttgttgttaataaattgttcctctcattaattaattgacaatgtctagcagaagatctcgttcaagacaatccggtgcttccgctgagatcactgatgctcaaatcaccgatctcgtttccaagttacaacaacttatccctgagcttcgtgctaggcgctccgacaaggtatatttattaactttgacccctctctctctctctctctctctctctctctgtcacatgcacacaccataactcacacacatacatttcacattttgtgtggatgcccttcattttggtagataataagtcacgctagctcgtgcctagcttcctctcccttattttctttagccacaacttgaggctatagtatatgggactcatcatcagattcttccccctcttgccccctattgactgcattacttaattactacttatatcaactagctagctccaagtgtatatgtgctataataataataataaaataattcaattataatgtaataacagatcatttcgttaaattttataataattaattcgaattcatatctaaaatgacttctgattaattgatagtgtaataaattttaagctgacggtgcatgaataataacgataataatagtaatattaaataatgaagtttaattatttataatgatttgtgggtattgtgtaggtttcagctgctaaggtattgcaggagacatgcaactacataaagaacttgcacagagaggttgatgatctaagtgaccgattatcggagcttttggctaacacagactccaacagtgctcaagcagccattattaggagcttacttatgtaatagtctagtctagtgcattaatttgtgtcgtgtgcatgtccatgtctctctcacttttttttttttatcactctgggtagggtttggtttgtactttgtttatcaacgcaaaggactaccatcggatccatgtgaattagttcttaattagttaattttaattatcatgtggcactttgtagtaattaatatcaacagcttctacggctgtaaataaaatggactacatcttggtgaattctaattattattagtagtatgccgcgaaaatatgttggatagtattatgatatgaacacatatgttgcattttataatttttcaaatttggaggctgcaatgcttgggtttaatcttagtaatctatcttatgagagaaattctgcagttttgtgtggacccattttaaaagggtcaagcttgaagctgacagtgcctataacatgtgacataccccacaccattttcggttatttgctcttgccaacccgtgatattaatgttcgcattaggaccactatataaaataactaactcctgatccaaaccatgatctttgccagcctacaataatatatatatatatatatatataaggataatcacaagatccatatattgttcacaaatatcagtgaaaggaaaaagcaagtcctggaatagctatattgaatttaattcctgtaaagtgggaaagtgtaaaaactaaaaataaaaaatgtatatcaatttattaatactttaaattaaaatattttatgaatttatcacaaatttacttaaatatatgtctgttacaaattttttaaatccctcacaaactcatcactaaatatgagggattatgttgtcacaaatgtccatcactaattttgatttttactagtataaactagcatagggttttatttattttttaacttctctttttcttttgttaaaaaaaacttctctttttcttgagaagttggagcaaatacattttggaaatgttttaaaacagcttaatttttataaaataaaataaaaaggtaattttttaaaaaaagtaggataaaaactttataaaataaagagttgatttttctgatttcactccttgcaaccctttttttcccccttctatcgctctccctactttctctctagcttcttaattacccttctcgggttacctttttttttaaagttaaaatataaataaaagttgctaagcatcttattttacttttaaattccttagtttaaaagtagtaattttaaagggcgaaaacatgtaccaaacataattaatttaaatatcttcgtccccaaatcttaattttctatcgctagttgggctagctaaccttggactttgcttagttaattttaattaaattaaatttaattagctgcttttgatctagtcaatttttatcttgcggtaaaatgaaaacaaatatcacgaccccacacacctgcaggtaccatttacatgcaatatgtggtgggggaaggttgtttcaaaatgtctccaggccccaaaaacaaaaagctagtctacagtgcaaaattaaatatagggccataaatttaggcagtgaaataattctgagtcgttaattcaaagcttatattgctttcaatccagggtagaagtaatttttgagcaatattttagtgaaactctgttgttgccgtgaaatgtgtcccaaactctttaatgccgtgtagtgtatccctaactcttcaatgcattgttgttgaaggcttatacatgttctaccaaattatgaacaagttgctagtcataaacaacttttcttatataaatatcagtgcctaattagtcaaattatatatatatatatatatatatatatatatatatatatatatatataaataaataaatataaagaagtttgtatgttatttaattacacgtctttcacgtttaaaatttcgcttcaaataattggatatcttcggataaaacgattgggttgcagtttgagcttagaggaggcctgatgtcatgtttccaattaaaatgtgatggcattgatatttggcatcagttggtagttgtctgcactaaaaatataaagtgtaacctgtaataatggataagaaagaaaaaatatgagaaatagcatatggtcctttttatctatcaagtcaataacatatacactagtatatgctattaatgtctttatttttcatgtttctaaataaaaggtgattgtgatttcagacttgatcaatctttgagtataaaataaattatattaaatttttttttatatatttatgatatctgataaaaattaattatcgttttcaataaaaattgttctataccaatactatgataagaagaaaaaattgcttacatattttttatttctgaacacacgttttctggcttttttgcattcaatgttttcatgttactaaactacaaaaactgaagaaatgtttatgcttttgagagttttgagaaaagaaaaaatgaatgacagaaacacactctttttattggataaaacttagattgttttattaaatactccctgagtcaattatgagtaaaaaaaataaaacttactaaaaaaattcataacttcattaaattgtatcatttttaattaaaaaataaaactttttttctaaattattcttcctccaaacttgatatcaaacataaaataaaaaagaaatacttgtattgcttataatcgaaaccaagggagtaccttgatgcattcattgtcttattttttaacaacacaagtcacttattgatgtgagaaaaaatatccttttttattaaatatatatagttattacttaaatcatttaattttataggtatttgaaaaaatttaaatctaagacattattaatttacattaacaaatttaactattttattaatttaatgaattatttatttatttctatgaaaaaaacaaagataataatatatatttttaaaagagttattattaccatatcttcacccccactttaatttctatctattttttttcatgtactattatctaatttcttaatttcttattattacattatttatcatttcctcagtcttcttttatttttcctttttttatacctatttgtccaataatttgttgctcatttaatgtttttatttatgaaactttaattatacttttagtctcaaatttaattattgctcatcgatatcaatttttgtcatgaaaccaggaagtcatgtcaccaatttttttatatcatctgatgtccttcacatgagttcagttttcattattacaatcgtactcaattcaatgaaattttaagaccaagccgcgcaattaattaaaacttctctatcagttatcacaaatttaattcctaaacatgttttctggtttcaatgtctctttgcgcagcaatacaaagactgattttattctcgaatatactttttaaacacacactgagtaattgtttaagttttcaagattttttgttaaaaatatgagtatataggtttccttctctacatatatgtttgatttagaaaagaaagaaagtaaggaatgaaaaagaaagaaaaaagaaaacaaatagaatagaaaatgagatgatttttagattttttggtatgagaaaaaaatgaaaaaatataaaatatcaaaaaaccctaaaataaaaaatttataaaaatgaggataaaatagtatttttgttatacatatatgttttcttttttctaactttcactccaaaattgtcattggcgacgacaaataatggtcgcaattaagaattggtagagggagtttgtaggattcaatgttaactaacctataataactattcaatttaacgattctaaattattgatcaaagtagatcacactagatcatttaaaatattgattcttccaaacaatgaccttatatatatgattatatttggtccaactttttctactttctttatcttatttatttgttttattctatattttattattataagaaatctttaggctaatacaattactcaattagccttttaatatttttgacacgcgtcacttttgtggggatactttaatcttttaaatatttttatatttatttattttctcctcaaatatacagatgtcgtcaagctccaaaataacttttttatgtttgacaaccactcattttttcttcttctactcacataaccaccaacacattcttttttcttttcacacccaaattctctcttttgtaaccaattacaaacataaccaattaaaaatagaccacacactcaactcaaatttcacacgtgttagctaaaaaaatctcactcacaacatattatatatatatatatatatatatatatatatatatatatatatattttaaaaaacataaactttttaaatctgcacattgacttttcgggatttaatatatattataataaatatttttttgtgtaatatttatattgagatttttatttttagataatgtgaaaaagtattttattaaatatatttttatcgaccaattacatctatacagagaatttttttcattatatatatatatgtatatttgtatcaataccttcaaaataatatatatttttttgtacccgtgacattgtgtgagatatctgtctggtttgcttatgattaatctacccaagatgaaatagtatataaatttgaataaacattgataataaataataataactttttaatatgcacattataatattatttataatgctccgcttacaaaatgttatataatatatttatattttattacactgtcatgatataataaaactatacatattatatattttacaattatttttaccatgacctcaaaacaatattatttttatcattatatttttattagaatatgataggctggaaaataattttagtctctttacattttaatatttcattttgatctcttaattttttgataaaattagtaactacattgattttttttacatcaatttgattaatttagtgatatgtagcgaattgtgaaagatattatattattcaaaattgacactattagtgtaaaaatttaacaaaatgccaacttgatctaagatattataagagattgatttcatatatatactataatttttataatatcatattatttatatatcataataagtatttatttatgtatactggttatattaagatttttttaaaattatttcaataaataatttttattcattcaataacatctttatagatgatcaatttttcattatatatttcttttttgctaccaataaatttgtaacaaaatataaattttaattattatttaaggaaacaatgttattatcatgatcattatatatgatttgttttaaaaaaaactattttactcttttacttttacaaataattgttttataatattttttcatttataacgtataaactttatacaaaaatcaacaaaattataagtttcaattctaattcctttcttttttaggtaattctaattttttttatcttatttcacttataattttactgtaaatttttttcatttaatatttaaattaatatataagtgactgtgttaaatatacacatgctaattaagagttaagacttaggagtcttaagactttccttaaaaaaagagacttaagactttatatggaaagtaaacaaaccaggaaaactttcagctgttgaaaaataatcctatttacaaatttgcagcttcataaaaacatcatttttttttataaaagctaatctaaaatttaagctggattcttaagcattttaccttcttctttttttttttgctttctaaacagcggaagttacgaaaaaaaaatccaaacatctgttagtcgagagttactattcccaccccattttgctattttcatccccgtacttttttcaaaagtatacaaaataacactcttgccctcccctagtttcctacaccccttcccctcactccttgccccacattttcctctctcttgttatttcttttatctttttaattatttcatttaattttgatataatttatccttttaataataattgaattaattaaaaaaaattatcataaggaccatgctatcctttttaattgtaatcaaattaattatgataaaattaacatcacaaaaaaggaaatttgcataaaaataatttgattattttttcaaatagtaacttctatcataattaattcttaattaatactgattactatttaaaaaaggtaaattgaatctttattactttgattttaattttaaaaagcataattttttttatcacaaataacttatatctacaattaattataactttttcataaaacaattaaaaaaaacatggaaatatgtttttgttatataaagtatagaatgaaaacatatttctgttgtcaaacatatgtttttgttagcatcattttcgttttataccttatccaacataaaatatattttcgttttctatttttttcttctccctcttatataacgaaaatgtattaacactagaaacatgattccataagaaagaacttttctggactaacaaaagacatagcagaatagcaattgatggaggaatcttagttggacatttgaatcctacaccctcttatttatatccaacaccttccattgtatgtcagaatgttcattcaagaatgtaaatttgtattttggaatagacttttcaaaatacaattggaggtgctggattcgatagtgtgggaatacaggaaacaaatgtctattagtcgtgtttggtggagtgtcggcgaggcccaggcccatgattgaacttgacccatgaaactatataataaaacccaagatagttttaatttaattctgcttcagaaatccctgcgtgaagaagaaatcactgtgtgtgattcaattgcatcggtttcttcaattccagcaccggtgcgtgcatctgatttatataaccttgtttgttcactcttatttttatgttatggctatttcatatttgaggtcagcatcataagcagttgttgtttcggaaacacaagatgaattctggtgggtacgctgttgaggttacgggtctctcgccaaaagccacggacaaggatgttcgtgacttctttgctttctccggtgtcattgagaatgttgaaattatcaggtatatgtaatataatctcttgatttaaaaagtttaatttctagaaaaattataatcatattttgaatgggataattcataaattgttacttgatgatttttgttttttttcaagtttcactgctttgctcgaatttatgcactcttgattttagttaactctatatagataaatattcacttggtgtttttgaatttgttaactctattaagctttcctgaagggattgtttttattttcctgctgctggaaggggatggattgtttgtgtttggtaatgtctgttttttagtcgaactgaaagtacgacagttttggattttatatatatttgtttgagatattgatttttggcgtagtatttagcatttgatacgacacatggtcattcctgagtacaggtctggtgattatgcttgtaccgcttatgtgacattcaaagatgcatatgctcaagaaactgcatgcttgctcagtgtgagtatctatcaaacttgtgtacaaaatacttgttatgttgaaactagactgatcttgtactctactagtcatttagttgcctcagtgatagattccatagtatatgttctttgtaaaatgattgtaaacttgtcgaaattgaatccataatcagtacatgtaccctctgggtcagggccattaccaacccaatctaaggcagggtcaggttcatgattgaaccaatcatactgacccaacccatatagggctgttgcactactcgatcccatgtagcaacaccaagatatacttgggaggagatttacacacgatttgagaaactaatcctcaaccccaaatatcaggtaaagtgtctgggggataaaagacccaatgatcaaagcagatcgacagattacactttgaatgctttgactaggtctcctcgaaccctagaggaaacctacatcgtaacaatattcatgtactgaatctgcaaatcttaaaataacagccgaataactgcaaagttgactactgactgaatgtaatgtactacaaagtaatcattctatggtaaataacgtgcagctatacatcaagtaacatctgccttatgagtaatatctaataatgtgtgcctttctttgtaatctgtcctgttagggagccactattttagatcaacgtgtatgcataacacgctggggacactatgaagatgaatttgatttttggaaccagccttcgtatagtcatgaggatgagactgcttcaactgtatgtatatattaatttctctctattgcactatattgctcacgaatcacgattatggctttctgttctgggtctgacattctatatttatacatgttctttttcagacaccacaaagcaatcaatttgtttcctctgctggagaagcagttaccatggctcaagaagttgttaggaccatgctgtcaaagggatatgttctcagcaaggatgcactagctaaggctaaagactttgacgagtctcatcaggtttccgccactgcaacagcgaaggtttctgaactgagccagagaattggcctatcagataagatatctgcaggtattggagctgttaaatctgtggatcagagatataatgtctctgaaacaaccatggcggctgcatccacagcaggaagatcggtagcagcggctgcaaactctttggtaaatagcagctatttttcaaaaggagccttgtgggtgtcaggtgctctaacccgagcagctcaggttgcttctgatatgggtactcacagggataggcagtaaataaagcattgacatgattaaacactatcttttagatatgtctgcttctgctaaatagcttttgaaacttcagttagcaatattattatacttttacaatacataaatcctgtttggataattttttggataaacacttatagaagtaaggtaaaatgaattgagcttctctcgtaagttaaaatcaacttatgcacttaacttttataaaagatttttcatttaacttttctgaaggccgaagtacataagttgattttagtttatgagaaaatcacatttcattttactttcttgtaagtatttatagagaaatttatcttaacaggatcatagtgcatgtaattatgaataaatctagtgtatgcccagacaggattgaactatgaaacccgtgctatttctaccactgaactattatcctgattccaaactttacagtacgtcgcggtagtagtcagtaaggggctgagattggtacattgaaatcattatgatttgttaaaaggatagaaattttatacaacaccacaatgtattatgtcaacgtgttactagagtaatattttttgcgtatcctttttttgtcaagctatgcacagatggtggattcagctattttgacttcaagtggttcaaagttatagagatgcttgggaatgagatattttttcagaaaatggcatgaagagtattggaatatattgattttagtttatgaaactgaaagaatcttcttttgtagcctgtttgattcatacttgttgtgcttgattaatgcattaggaggcaatcgtagcagaaggaaaaataaataaaattctatcaaacgtgcagttacatcactgttcaatgctgaaacaaataggctattagtctaagatacacttcgattagttgggtctattaatgtgacatcagattaatggattagtctttcaaagattgtatgcgacgttgaaatggttctttccttgctcaatgaatcgatgaaagcactgtgcttacgtttcattgatttcagtgattgaactaggattgacctgatatataataaaaagttaagtaaattttaaattaatataaaagtatcatattacatgttatacaagataataaagaatcataataaataattaaataatagtaattatacatagatctcatgtatgaacctttattatgaaatgttttagaatgaaaaagtttaagaaacaaaaaaaattattttttaaaaatatcagttgaaactagttttctactttagttttgatccacttttgatccgctttagttgattagtttactatttcctctatttctatttacaagacttaaatttaaaatgatactggtttttttttataagatttaatttataatattttttacattaattatttttaaattaaaaatatattttattaaaagaaaaaaaaatatatattaacaaattattaaaagagaaaaataataatgacaaggataatttaaaaaaaatatataaatttaagataaatttattgttataaatgatattaacaatcttctttaattttaatgaaatgaggtaattgactcatatataaaaacgaaggaagtaattttttgacgatttaaaagctcttttggtgtttaaaagctcttgtagttgcattttttttaatccaaattggtcatcgtaatgaaatcgctttagcattgttcaactaccacgtattactactcattgaacttccctcatctgcccttgatgacatatttactcattttgttgttcattgatcctaaccttctgcaatcgcaatccaccatcacccaaaacaactgtagtggactgaagacaagaaccacaactccaccaatgttgcgtgaggatgggaagtaaaggaccaaatatctcctcatttttgtttttgttgattcaaatatcaatttaaaggtatacctttgtcctgatttattttcatcaattacttgtcatcactgatctcttgcaatatcacttttaagattaaattagtttgaaatttgaattggcaaggtagcaacaagatgaataattgcaggaaagtggggttctaataatgggcaggcctggatttctcgagattgtattataacaactaaagactatgttcccaagttggtaataagttttttcctaatgttgttagaattctaaatttgttggtttgtttagtgtttgtttccttctattttaggtggatgagctaaagactgaattggagaaattttatggaaagaactcattggaatcaaaagatttgtcccgtgttatgaatgctgaaaataattcaagtttcacatcggttaataatacaaccatattagattttataagtgagagataaccattacccattgagttgatcactccacattaatgtgagaagcctaactcaattccaaaaactagttcaatgggtgagaatcacttattttcaacaatgaactccaaccactttaatcgcttgacaaaactcttagatgatgataagatggtttttggggtacttattgatgaaatcctgatttagtgaaatacaataagatcttgatcctagtatttctttttctcaattgctggaagattaacccattgttctattggatgtcccacgggacttttttattatgaatgaggagatatttggtccttttcttctcttagcaaccctttcctcaacgtcacaaatgcaaccacccccttgaaatccaggtgatatggaaagtcacatctgcaaactctatagtgaaaagtcatgtcattgaccgaatgaacgaccttaacatgatttcgcaacgatgactacattgaaagaaaaataaataaatatagggaccaaattcgatatactttaaagtataagtatcaaattataaagtaagtgtagtcaaaaaggttatttaaaactttttttagttatccgaactcgccttcgagttaaattggtcatcttggtacaatgttaataacaatgaaaaaaatagaaagttttgttaaagaaaaaaatcgtattgctaatggaaaaattatttatatattgaaaatctccttaacctatgaactggtacataaaataaaaaaatggttttacatattttttagtttttagtacataaatattattatgaaagtcgtctaataaattgcaaggctttttttttttttttttttgtcgtgtcaacatctacgatccttgtgaagatatatctgtcaggcatattggttgagattattcttctttctccattttttttattttttatttttacaatgatggctttgaagactaaacataaattttcatgcatttattttaactcttatcaccgtcttaaaggattagtaggaatatgtctcttaaaataccattttttttcatttcttcttattttcatattcaagtttgttttcccttgtggtatttgcacggatcgagcttgttgcattggttaatagtaatcggagtcagtcaaatttgactaacgtttgaatgtcttgccaacgctgttttgacatatatactgtttaatttcttcagatgattataattaatgatttggaaacatatatgttgatattctaaaacttgtaaatttgaaaattatgtgaagtatggaagatttgttaaaacagaatggcgcatgtatcccacattcaaatgtacactcatttattttttcctccccaattgtgaaatccgcagttgcatgtagtagacgacacggtttgtaattacaatatgatatagttcatcaattcagtgagataatattgtgtttttaatatattagcaaaattctgttttatgatgttatccaacttgccacatgcaacatagtacgatcagccctgacaagttgacatcactttacatttttattctttaggaaaatgttttggaaattaaaaggggataagttgtgttatatatatatatatatataatagtacatgtagtattagtttttcattattcaaagaatgaaattatatttgttccactttacaatcaatttcctatctttttatttcttttaattgaatcatttatgttttttcaacattagagaatgggattgtaaggtgtaacaataaaacagtagtttaaaaagaacttttttcttttatgatatatggaagatgcagtgttctttagttgggctgtgagtgggcagcaaatatataaatatacctaataaggaatatatagaatgttaatttatttatcattaatgaaaaaaggaatatatatatatatatatatatatatatatattcgtttaaaattatgatttaaaaaataatttaagattaagaatatcaagtatatgaataaattaagataacaggatgataatttaagatggttgataaaaaaaaaagtttaactggtatgaatgcacatttaaatgagagaaaaaaacatattaaaaacgtatatttgagagagcagaaaaattgtatattttaatttataatataagaatagttataatacaaaaatgaatttaaatttaataaattatatttaatttgttgaaaactgtaataaacttttaaaacttcatctaatgcaacttatttaaacttttttttaatcactatgttataggtataaaagtatttaatgagtatacctctattaaacaaatacgatccattttttagtgagataatttcttctcttaacaacaatcgaatttaagaacttaatgtttaattttttttgttatttgtttgaactacatgtaacaaaattcttattctttttattggttagtgtatcctagaattaatcatttcctttgaatttgtaccattgtcaatttcccccgcacctttccttgctttttaaaaaaaaaaattaaattagtcattttttttaattagaaagatttttttcatatttaaaaacactaaaaatatatactaaaacatgtgattttgttatagaaaaatgagataaatatatatattaatgatacctagaaatgatcaattcataggtaacactaattaagcagcaaagattgcaatctccgagcttgtctgacgttgatgcaggcatggcatatgttatgcttatatagttgccggtaatctatccaactataatagttggctggtcaattccatcatcacttttgtgctttggctgctaagaattggttaatcaccttaatagtacattcataaaagaacgttaatagtatacaaaagcaaaaaaggagcttattcatttcacactgtctatctagttggccaaatctggacttttatgtgtaaccagagaggttcttaaaagtatccagcatcaaaagcattcatcgatctcagtgtttcattaatttaatttgtgcctctctaattaataacttttcaatagacaaagctttccatcaatctaactaattgtttctaattatcacaactatcggtattcgatctcatggagcgtaattaaagatttagcttaattttgaatgtgcgagtgtttgtaaattttttagtatcgtatttaatttttatgaataaaaaatggaatgtaaacattttgagccgatgtgggacttcctctgataccatgttagatttcatcttaaaaccaattgacattaaataaagttgtccaacaaatatataagctgcactctaatgattgaggcaaccgatgtgagacttaggtaagctttgactctgggatctcacattcgctttcgctgcgacgagcacccaccatttgtggttcacgcaccgaacccaataaatgttgggcgtgaagggggtgtattgggaaaatacccaagtcccacatctgcggtctcaatccttggagtgcagcttatatatacctattggacaacttcacttaatgtcaattgatcttaagatgaaatctaacaataggtaataaaacaaataataattttttgtttctttttttaccgaaaaatacattaaatttatgctctaattttaagggaaagatattcttatatacaattaggggtgtaaatttgtcaactcaagttgtgtatttaaaattaagttgatttgtaaaaatatattatttaagtttgaattttatttcaataaattaaatttaaaacttgagcttatttattttttaaatatgaagtttaatttgagtttttggtacacaaggaaaatgaatattgagtttgatttatttagtttatttattattttattttattttattctcataaaatatacttgcaaagcttttaaaatttattaatttaatgtttaatatacattctcatataaaatatacacgcattatttatgtgtttttaaaagtttgaatttgacttaattatataatcaaacttaaagtcaagtttgtaattgtttattaaaattattgagactttcttttgatttatctttatatgatttaggattttataattatataatcaaacttaaagtcaagtaaatcagtaattattgttatatattttttataatgatgtaagaacatacaacaaaaaatatatttacataaaagataaattaaacatttttttaaagatccaaaactataaatgaaaatcactaatttcatatgtcaccaagaactctaatgaatttatacatacatttgatgcaacttgacatttaatttgtttttctaaggtttgcatagaatttgtacgtatttgaattcttgtactcagagattgaaaaacaagctacattctgatatttgaaattggtttcggaattcatgtctaacaaattgaactgtaaatcaaacatgctcttacttgtgacaagacaaagcaataacttgcccaatctgcaagatggatagtataatgatacattgagaagaatcaaagggagaagaaatgcttattccatgaaaacaaaaattatgaagctatttttaagcttgtccatccaggtagagatgaaaacgttcacgtcgaactaaaacaggtttataatagtctttgaagttgttggtaataaagatagattgcagttgccattttcattgataaattgcaagtaacttttacgtcagtaatatagaagtattaaaaaaaaattgtcagaaaataatagttgacatttccacggataaatattatgaaatcttacttaatatttttatgtatgaagacgttacagacaacttctttcccgataataaatggacttttccatcgataaattaaaatacgtttttctttagatgtacatatatgttacaaagagctttttgattgataatacaaagggtattagagtgagtttttcagtcattaaattatgatattatagtattattttataccaattttgtgtatataatttattatttaatttatatatatatatatatatatatatatatatatgcatgtattatacaataagaaaatgtttattacataattgaattatactgaaaaaaaaaaaaaaaaaatatatatatatatatatatatatatatatatatatatatatatatatatattacagtaaaagaatgtttattatgtaatataattatagttgattaaacttgttgtaatttgtaattaaattataaaacttagtttgcaggttaaccaaatctctatatgatctataataagggtttagatgttagtacaaaagatttgattccttcattattaacctcgaatacaacaattaatcaatatacaagaaatttgatataacaatttcaattcatcgtcttgtcattattgaatgttgctggcatgttggtggtagaccacaacaataaccgagtcaaagaactgaagacacagttggctagaaaatttgatatatatgaaagacttgggatctataaagaagattttgaatatgtaaacttatcaagatattaagatttgtctttcagatgaattatatataaagtcttgtgttgcttcaacatgcaagattgtaagtcaatctctaatatatatttcttgataaatataaccataggtatgtgccccagtaacaaagcggagaggatgaaaatgtcttgacgttgtatgcaacaattgtaggaagccttatacatattatgatttgtactagactaaacattgcttaagcagttggggtggtcaatcaatttattgcaaattttggtagaaagcattgaaatgatattaaaataatcttcttcgatatattaaagaaacctcaagtgttgcattatggtttgtaggataagaatttattgttaaagtatgttgattcagattttgcatatgatcgatcttgataaagaaaaattcactacatgatatatatgtattcacaatcgcaagaggaatgacaagttggttatccaaactacaaactattaaaactttttctactataaaagcttattacatagcaactatatgggcatatatgcaagaaagctatttggattcaaaggttaatggaagaatttgagcaaaatctgataaagagagaatgagttacttttgattggaaggaacacattgtcctcttgaaaaacatgaatagatagtgaaactaggtttaagaaatccatgactttcaatagaaagaataaaaagaatggaattgaacaaagaaagatagaaaccccctttttgttttttcttattactgtcaaaaaggttctgttcagtcaaatggtaatagtttagttcttgtaactcaattagaatttccctcatagatcctgcttttacgggcatcaaattgggtagtgggcataatggctttagctctagtattaattaatggacatgctttgtttttttttttttttttcattttgatatatctagattgaatttggttgtaatatcaccctgtttctttctttctcttgaatttgttgttaacaatattctctgaaactgataaatttactattcttaaaatccgatgttgttattagcataggctatattaatcagttttcttggtgataattatagatgttttggatctttctgaacggtttactttttaacattctatcgcaatctaaaatcatacttagttgggatcactatctaatatgcagtgtcatcataattatttcttactaatgaacatgatatcataggttgtttaataaacacatctttggggctgcagatgaagttgagttgatgtttatgaataggtgattgcatgtgctttgaatcactatatataagaacttttgttttctgaaagaatatacaagaacttaagaagtgtagcattactagcataggtgcgcattttatcttttttgtttgtaacttggatacacaatgttctttcctttctggtaggaggagccatgaggatctgcatctgttcattataatactgaaccaagaaattagaagattatcaacccaggtaattatgccgattacagcatgactaatactttactggtagagagtctgctataaacttgtagctttgttaaataaaaataagaaatgtttgtagagagtgaaacctttacatatcgcacaattttattgattgcatcgctgtaatcatttatttaaataagtaattatgtaaaaataaaataaaatttgttacataagtaattatgtaaattgtgtacccaaaattttatatctttatctcttgtatgaccttataggttataaaagtgaaatgatcactccatgcacgagaggaaattgtttttgaacttcttaaacagttgagaggaaatgcagcaagagcattgctggaaggagtaatgaagagtacaaggcaaatgattgggagcaagaagcaatttgaggtcgcttattcataatccaagatgtgacgcaaagcacattccgggcatggttgtaggtttttaattttttttaccaactattgtactataatctataaattagtaagctacaaatgtttcattgaatttatttatgtacctgagttcatacagtaactatataactataagcgtgcaaagaatttatttggcattatcactggtgcatgatattttgtatccaataagatgaaaatgataatgaacttgaattggccatttatctttggaggactatagtaagactttcattttttaatcgagtttaaaagtaattcttgtaatatattcatttaattggcttttatatcactgtagcattcataatggctaagcattggcggtggagagcaaatgcctccatttgcattccaatgaaataaatgatgatcttgaagtcaaaaaaatttgtataaatattatgttttcctatcattttgagtattcccaacgatagtatcattctaacattaaagaagaaaatatttaaaaagatgatatttcttgtgagattttctcaatgagtatatggatcattatctgaccatggccatggcctactcattcatatatccatgcttaagcaattacgtctaaaggttttaatgcttggtgaaaaatagattgagtgaccaagactactcatcaagcttgactcatacatagcacttaaacactcaatgcttgatggcatatggatcgtaagatcaaataagaaaataaagaatagcagatcgaccataataagacagtggaatctctaatatttaaatccaaacttttgctaagatttgtaaagatgcaaaaaatgtttgctagctccttctctttcattcattttttttccttttctagtttctaacccagcattttcctttagatttattttattttattttatctccttttggtaaagccctctaacttctttctctatcaaatggatgacattttcacaatggagccaatccacgaagtgtcctccgcaatggacggttctgatgtacgatccatctgttttcctcataaagtaaaaaaaaaaaaaaaaatggcaccaggaaacattaaaaatttaaaataaaaaagaacatatataattggactagtagttgacgaatcaccatcaaagcatttctccacgaatagtcccaaaattcagaaattgaaaatttgcacaaaggaacagcattatggttgtcattattaatttttttttaaagaaaagaaagcactctctagaaagagaaatatgtcaagcaaaggtggcacatggaaattgagtaagctgaactcacaagaagcataagagcaagtggatggaagattcattagctatatagttttcccacctaattaaaatttcattttactattgaaatttccttttagttatttaactgaattgcaaaattgaggagagaagaggattgagagaaataaaaaaaagtctaaggaacatggatccaccctatgccaatggggcataccttcagcttccaactaataaaggcatgttaagtttcgagagttgcttgtctttggctaaatattaaagcagtatttatatggggtccattaatgtcctatcattaccaatatttagattagtgagtccttttgttccttttctcaagaccagattgattctattttttttttcatgaaataaggatgccttcattttcctctgcccatacttataaagccaaactttgaacaagcactaaatggtcatacccatgcacaatttatccaaactccataaccatgtatgcgcatttgctctggtgggaagaaattaactagcaacgtgtaatccaaacacataccattttaaccttgaactttctattagtttaactctaattattgcttcataaattattttggaattttcctttcaattgaaattcccactcactcatgttttaactttgactagatcaacctaatggtgggaaattgggatataatgcatgagttcaaacatctgaccaatgtacacaagaaaattaattttaattataatttagaattttgaatatcattatgattttttagtatatttatctattactgtttatttttaaattatatgttggtaggtattgatatatattaaaataattatctttataaatgtcttatatcattctaatttatacaaaaattcctttaaaaatagtagctttataattgtatttgaatttatatataactaatttaaagcaaatattagctttttgttcgttgttgttgcaacgttatgttttttttatcgataaatgataattgttagtgtgttatcattcttggagcgtatcaaacaatggatagaaaactgacatattcaacagaaaatgtgagtagtgtgaatttttaatattatttttaatttccatgaaaaaaaaatcatgaataaaaaatattagttattttttttgtccttctagctttctttccatttcatccttttgtttcaaatatgacatgtacaattcatattaacggtaccttttgattgactaacaatataaaaaattttagccccataatacataaaaattaagctcttaatatataattcttaaaacattatatatatattaaaaaatataacatgaaattaacacgatctaaaatatattcctttccaaaatatatgaagccggaggaatatgtattgttagtagtagttttttttttcctattttttggtgtaacagtcttttataaaagcactatataaagaagcatatgtgtaagtgcttgataagaaaatatccacaagtttcattaatatatattctttgttcatatttgtgtttgagtgtgcaaaggtttattctccaacaaattggtatcatagagctctaaggtttagggacccgattgaaggtgctgcaatggcttccgcaacaaacactggtggattcatacatgtgctaccaattcttgatggcaagaactatgatcaatgggttgtaaggatggaagcgattctaggcttccatgagattcttgacattgtgaaggaaggaatctcagagaaggagaaagatgatgttgcaattatgaagaaggacttcaaggcaaagtgtcttcttcatcagtgtgttgattttgttgtatttaagaagattgcaaaggctagtacaaccaaggaagcttgggaaattctgtagaaggcatttggaaatgcaggaaagaccaagaaggtgaagttgcaatctttaaggaggcaatatgaactcctctcaatgagtgatcaagaaacagtggctgattacttcaacagaatgtagctgttggtaaattcaatgaagacttgtggagaatcattgttagatcagatgattgttgaaaagatcttgagaactttgtctcctcgatttgatcacattgtggtagcagttgaagaatcgaaggatcttgaaagattaaagattgaagaactgcaaaattctcttgaagcccatgagcagaggttgaatgaaagggcaaattcaagggatttggatcaagcgatgcaagctcagtttaccaagaatgatggaaataagaagaaatggaagaaaggaaaaggcagtggcaaagggaattggttctcaaataaagaaaatgacaagattggagataaatctgaatcctctaataaaggaggaggagggaacttcagtaataaaaaaggaaagaaaggccatgataaaagaaaggtttagtgttataactgtgagaaatgggggtattatgcctttgaatgttggtatggaaaaggaaaacaaaacaagaattctgaagaaaggaaaacatagctcaagatgtagattcagaagatgaacaccctgtgatgttagtagcaactagtgatagcaagccacattctgaggcttggtatctagatactggttgttctaaccaaatgacaggtcataaggagtggcttggtgattttgatgaaaacagaagatccaatatcagattggcggataacagaactctaagtgcaaaaggcatgaggaacattcttattcagagaaaggatgggaaaacagcactcattgaaaatgtgttgtatgttcctgggatgagatgcaatctgatgagtgtaagccaactggtggaaaagggattctctgtgtcaatgaaagatggaatgctggaattgcttgatcctaatttgaagctagtcttgagatcttcattctcaagaaatagaacctttcaagccaacattaaggcagcagaagtacaatgtttaatggttacaaagatcaaccaattgagctggctttggcatctcaggtttggtcacttaaatttcaaaagtttgaatatgttagtaactaataatatggttataggtctcccaaaattaaatgtaccaaagaaggggtgtgatgtgtgtcttattggcaagcaaccaagaaattcctttaattcccatttgccaataagagcttatagtgtacttggtgttgtgcattctgatgtgtgtggtccttttgaggtaccatcactgggtgggaataagtacttcacatctttttagatgagcacatcataatgatgtggttatacttgatcaaggcaaaagatgaggtgttctcagttttccagaaattcaaggtgatggcagagaagcaaagtggacaagctttgaaggttttgaggacagatggaggtggtgaattcacttccaaggcattcaacacctactgtgagcaacatggaataattcatgaggtaacgacaccttctacaccacaacacaatggcttagaagaacgaagaaatagaactatccttgacatggcaaggagcatgctaaagcagaaaaaactacctcattcattctggggagaagttgtgagcacaacaacttatatgttaaacaaatgtcctactaagagattgaaagagaaagtcccagaagagatttggtctggaagaaagtcactggttagtcatctcaggatctttggatccctatgctacaaacacattcctgatgccaaaaggaggaaattggaagacaaaaatgaaccaatgatattgataggctatcatgttactggtgcctatagactttataatccacataagcagaaggttaagatcaatagagatgtatacttcaatgaggcagaggcatgggactggagcaaacaaaggtgtgaaatcagaccattgatatcaacaattgaagaaaatcagaatgaggttagcactataaacgcaaaaataaatacagaggtagaatcaccagaaaatcagaggccacaaagagagagaaggatgccaactagatactttgattttgaaatgggaagtgatattgaggtaacagaagaaggagaattggttcactttacattactagcagatgcaaaaccaattagtcatgaagaagcattacaagaacaggtttgaaagaacgcaatgctagaagagttgaatgctattgaaaagaataacacttgggagctagttgacttaccaaataagaagagagcaattggtgtgaagtgcgtgttcaagttgaaattgaatcccaacggcattgttgcaaagcataaggcaagacttgtggcaaaagcttccttcaaaaacttggcatagactattttgaggtttatgcaccagtagcaagaattgagactattagactagtagtagcaatggctagcaaccacaattgggcactatttcacatggatgtaaaatctgcttttctgaatgatccattagaggaatctatttttgtgactcaaccaccaggctttgtgaaaaaaggaatggaagacaaaatgtataggcttaacaaggcattgtatagcctaaagcaagctcccaatgcgtggaaatagaaggattgacacattcttgattcagagtggattcaagaaatatttagttgaatatggtgtttatgcgaaaaaggagacaagtgtgattctgatttgcttgtatgtagatgatcttctggtaacaggcagtgatttaaagggtattgagttctttaaggcacaaatgatgcaggaatttgagatgatagaccttgttactctagcttatttacttgggttagaatctgtagctacctcaaaggaaattctgcttcaccagcagaagtatgctactgatgtattgaaaagatttcatatggtagattgaaatcctacaaatactctagcagaggttaatacaaaattggaaatagcagaagaagaagaagcagtggatccaaccatgtataagcaactagttggctccttgaggtacatatgtaacaatagacctgacctctcctttgttgttggtttaatcagtaggttcatgaataatccaaagaagtctcatttgacggttgccaaaagaattttgaggtatgtgaaggaaacattggaatatggtgttttgttttctatcaagacataccaatgaatagtgagtttactggggtattctgattcagattggtgtggaaacaaaacagataggaaaagcactacaaggtacttgttcaagtttctaggtgctccaatttcctggtgctctaagaagcaacctgtggtggcttgtcttcctgtgaggctgaatatatagcagactcatatgctgcttgccaagctatttggctagattcattgctagatgaattgaagtttgaagcaaagaaacctattaaattgctaattgataacaagtcagctatcaatttagctaaaaatccagtctcacatgggagaagtaagcacattgaaaccatattccatttcctaagggagcaagtgaataattgaaagcttgaaatgacatattgtttaacaaaaactcagctagctgacatactaactaagacaattagacctgacagatttgtaaaactcataatggaattaggagttatatcttgtaatgatttggattaagggagagtgttgagtttaatccaaatataagtaagggtattgttaatagtagttggttagagtgttaatttttttttttttcaattttctgttgtaacaattttttataaaagcagtatataaaagtgcataggtgtaagtatttgataagaaaatacctacaagtttcattaaaatatattctttgttcatatctgtgtgtaagtgtacaaaagtttattctccagtacacacaatgttagacacttggactactacttattatgaatttaatgcttgttgatacattggagggaaagaaattatatactatactgtagaaccattggaccagtagatgaagcttaattatgaacacggtccgttcttaccttgagaatattgtgaatattaatgcaactaaatctgtgtaaggttctcataatagtttgacatttattgatcaattgaatctgaaataattaaatatctgataatagtatagtatttcaatatggatcagtaattcaaaaacaaaaacaataaattccgtagaagctaagggagcatgaatagaaatgacgagacacaaaaggcttgatcagaaggaaggtgtcctatatcgaccaagggaccaagcgcgcattagcccttgcctaattgcaagtatatatacaaactcattaagatcgaaggacaaaaccccatgaaactcaacaccaaagtgtcatgctcataacgaacaaggccaccatgcctgccttccgatatttggccgtacttgcatgagggcaccttcaaataatcttgactagggttgtgaaaaaaatgaatttattttttaaaaatcccaaccaatccactttaactaattacttttataaagtaaatttgattcgagattttaaaaaacaatttagtttttctaggttcattatttagttattaattttttattcatatatgaatcgatctttctatatataaaaaaaaaaacataaccaatcaaatcaaacttctttttaaaaatgatttgatcaattaatcaaactattttcatacttctggtttaaccaattaaatcaaacttctggtttaattttttctttaaaacggtttgacttttccaaagtgattcggtttagttttttttcacatccctggcctcgacatatcacgtactgagttgtgtacatataaatgcaaaacgagccatttggtgtaaggaccgatactcatattgcctattccaaatggtaccaacatgcaccattacaacggtacattaaatctttattatagttaaaatttattataaattatataattatgaattaattataatgagttagctagactcgttaaataagatatataggagaactacaaaatattgtgatttcgtataagtttccactaatactaaaatatgtgttcaatacagtgtcacctcatatgttcttgtatattgttttcctggtctatttgaaaattatgccacaagtagccaggggtttaagtaattttacccaacagtagcagtaattttttttttacggtacacttgcagtctgacaagacataaattacaatagactttgtgggttgcatgatttgccaactatatgcatggttacatataatatcattttcaaggatggcaaagcaaatgctaagtttgactcaataaaactttgatattgaccatggtcaactaccaaggaatgaacttttctctttcttttattgaattattggttacagacccaataccttgtttaagagattaatggacttatgaatgtacatgggtaggaatactccttgaacctatgattagataaaataattacttctttcgattttatttataaaatttagttatctaattcatcacaattaaaaataataataatttaactaataataaaatgtcttaattttttttcttcaaaaactaccggtgtaattaataccctttactccctctctcttcaaattgtttgttattgcaacatcttttaattataaatattttaatctaaaaataattaatataagtaatattataaattatttgttataaaaatgatcatattaaatctataaataagatcaaaagaagtattttatttcttgtttggcttacaaaaggagtgagattttaaaaatttatttatttattttaaatccttataatactgaattaaaaacataagaataggtcatatttagttaataatgaaaaatcaattatgttggtaatgcaaatccagaacattttgaaaatcgatttcatgcccaagaattaaaatcaaaattgattatcatattttgaaaatagtttattttaatttatttttttctctttcttatttctctcaaactcacaatttaaattcactttatctttttcctattattattcatcctattttcacttatttatttcttttccaccaaacacacagttagagtcttaacatcggcatctatatattaattttttttattcttatatatatctttttaaccattgactttttaaaataaaatattaacaaacagaattttattaaaatttaaaaatatttttaaaaaaatatatattttagatatttgtatatttacaacgtatacataaaaaaaatattaattgtatttaacaattaatattttttaagtctaataattaatattgttaaggtagtagctcaatagtgtttttattttattttatgaagggcataactcaatagttttattcaagtcaaaatcaaaccatcgattttaaatgttaaatcaattgattgatggattaggcaaattgtctcaagccgttaactcaatgaagaacccgtggtgatgcatgtttatggctgattaagctaatttgggaccacgtgttggaaatttaattccttcattggctcccatatgtctgtaaacttcctaattgaaatataagaaagtgattgatgaaaacacaacaacggaaaaataatagtaaattttaatgtactttttactatatagaaaaaaacatagtaaaaaacgtaattgtaaatgaaggtacacttcctaatcaatgtgttacggtagaaaagtttatacccattaaatacttaagttaaatcttgaaaatataaagaagatattgttggaagatagttccattttgacgcttaaccataacccaatcaatctcttacttaacaagtatgatggcactttataggaaaaaacacatttctcacattgacactattgtggttcaagtaagctttgttttggttaaaaaaaaaacaaaatctttttgatgaagttatcaaactcaacaatcattagcaaaatgtacatgtccttttttacccgttgatgtggaaactttcactttcaaaattaaatttcacattgtgtaatgtgtaccacacacctcaactggtcctctctggcaacttatagtggaagaaattgcagtttgaaagagggaagtaatttcctgctgcctctatttctctgtctccttctcagatagccaaggtcttgcacccatcatgaattgccttgtaacataagccaaactaggcacatgttaaagggcatgcacaaatcttgaacatttggtcctttacccttaccatcttatataggctattgcaaaatattcaaccacgtttgacttctcttccatggtgaagggtctagcacaaaatgacacacacagctataccatagtctagatgagttgcaaaatgcataccaagattatttttatttttttgtttaaagagattgcaattgtttattggtgtaccttgtttattcaattatgtattgcatatttatattgtgttgaaacttgagtacaaagagatagaggaaagagaatatatataatgtatacagggaatgtactgcgggccaattaggaagggagttggaagtggctaaggtcaggtgaaaggagtagtggttatgtgtcatgtagatggacattatatttttttagaaattccactgctgctacagaaatttaatttaattttttttatcacattatattacttattttatttatattcaacatgaattcatattattaataaataattttgtctcttattcatatgattatgagtttaatttttaatttgtacttatgaaaaatcatatatttaaagatgtcaatctcttaaataaatcatgcattttacaagtttgatgaaagataccctgatttatagaaaaaacttattttatttatatttccctctcccatttttctctctctaaaggcaccccaatgaaggtgcttatctgttaaaaatttatcaagcattgtttttccttaaaatttttacaaattcatgtatatgtatttttacagcgataaatgtaatgatgtgaagttatttgagggatctatttaataaaatttttagaattgttagattaaagatgttaattatttagtttatgtttgttttatatgaatcacgctttcaaaacatgttgaatctgatttatgtgagaaaaagaattttgtgttgaatgtttcaatgtcaaatctgccttaaattataaaaggtaaatataagtaatgtgtaatagttagacccgtctaaaacattcgcaaaatgtaaaaaaaatgttaaaatggagatgacgtaagtgtagattggcacttgagtgtcatggatcattcttgcattatatgtggctaggaaaaggacaaacaagaccagctctggtagggtaacaaaagcaggaaaatattttcactcttggtggaagaatataatatatatgtacacttttctttaaaatcattacactttacattaatagttattttttccctttcttattttaaatgattttaaaatagaaaaggaggaaactctcaaattgaaaacacagtaaaaaaaaaaatactagttactaatgaaaaattgcaccagcctcagggcttaggttgttgtggattcaagttgcaatcccatatcatagcttaaggtaaggaaaatataaggttgacttaatgataaaaaaaaatttaattattttataaataaaaattaacaaataaatcattaacatttatcaataaaaaaagaaagagataccaaatacagagataggaattgggttggaagtgatgcaaagggataatggctgatgcgaaagagcttcgtcctaatacacgatacctgttggtgggttaggtagcaaaccctgcccctcctcattggacccatcccctagattcctgccccttctccctttcctcttctctttctctttctcaaaaaaaaaaaaaaaaaacacaatccattttggacttaaagttatagccaactcacttctcttttttcttaagtaacctcttccattcacaaaatttcacacacaaatatcacctcaccatgtaaaagttttcttttcctaacaaaaacgtctctctctctccatcatccatctttcttccctctcaaacacttgccccatcttatgtcttttgcttatgactttttattaatgtaatcatcaacatggccatttcccacttcaacattaaagaattataatatctgaatctctccatttcctttttacaatggaatcatagactatggaaagcatctagctgcattgccaatttgccaattccatcattatattttaaagacaattgtctttgtaaagaagaacccccctcctcttgtctcctaagtgagaaactagtttatcattaggaaaataattacatttttaagagctttacacatgcacacactacattggaataatattattagacaggttgaggcagagaagcaagctttccttttctccttttctaaaatctaaacacaatatctttttctttattattttcccatgtacactgaacatcctttcacatttaatataattactgcagatttttttttctacaaatgcttaactaattgctttttccttttttatgtacaataatgaaaagaaataaaaaaactagtgatatatatggaagtcgatatctagagctaagtctatagattcaaacatatctctctctctctctctctttcctcccttccttccctctcaacttcattttcctttcaaatagtaacactagagaacaaaagctctggctagaacttgtaatgtatatgcaagccatcatcattcagaacaattagtgcatcatcctccttcaactgaagaactttatttaatttgctcctaaaatattttgtcagaggatgtggtgcagtaatcctttgccattccttctttatttttaagcttacagcatctgcaatcatctcttattattacttcaaagtggcgatcacactatcattcattcagctgatcttgaagattttgtggcaggcataaaacctgcaatgagatggctttcttcccagcaaatttcatgctccaaacccctcaccatgatgatcaccatcatcatcaacctccaccttctctcacctcaattctaccaacgtgtgcacctcaagaatatcatggtacactctctctctaaaaactaagtatcagatcaacacaagcacacactcaactcaaatattctgttttttgatcaacaaatgttaattgttagtttgttagtttttgttggcaggagggattgaaccgacaacattttcctccattccttctttcttaaccatccaatcaaccttatatgtccttctgatattgtgttcctaatgttgatgcagggggagtgaccattctaggaaagagatccatgtcattttcatcagggattgagcatggagaagaggccaataatgctgaggaagatttgtctgatgatggatcacaagcaggggagaagaagagaaggctcaacatggagcaagtgaagacacttgagaagagctttgagttggggaacaagcttgagccagagagaaaaatgcagcttgcaagagcacttggcttgcaaccaagacaaattgctatatggttccagaatagaagggccaggtggaagaccaagcagttggagaaagactatgatgttctcaaaagacagtatgaagctgtcaagtcagataatgatgcacttcaagctcagaaccaaaaacttcaggctgaggttagtagtttttccttctaactcaatcaaattctaatcatttggatttagtgctgtagtgtagtatatctatctcctgattactttcacatcattttttttcttttgaatttttctttttcttatggaaaagtggagaaaaaaataaaaataaaagatgaagcccccttttgacatgttgaatttctgctatgagactgttttgatgagattgttttgattctgtagaataaagctttgcggtagcaatgatgatccttctttttttttttttttaaatttcccaagtgtttatgcttttttgacttgtgtgtttagttttcagaaccgttcgtttcacccccttctctaactagtgactttctataaagttgtactttttcctttcatctacagtgacttcaagattcaatgatccatcatctctctccaatgacatcttccattatttctctctcttgcatagttcacttgctttgttttgcacataacagttttaatttttcaatttctcatcatacataccatattctagtttctagatattctataaaactctcatcatgttggcacttttaggggtggtgtttgatgttagccttttaggtcctacttttctgcatgcatatatcatattgcatgttgttttgttattagtgtacccttattggattaagtaatatttctggtgcagatattggcactgaaaagtagagagccaacagaatccataaaccttaacaaagaaacagaaggatcctgcagcaatagaagtgagaacagctcagacatcaagttggatatctcaaggacaccagctattgacagtcctcattctacacatcagcaacagccaagcagacccttctttcctccttcttctgttaggcctgcaggagttgctcagcttttccaaacttcttcaagaccagaacttgcatcatgccaaaagattgaccaaatggtcaaagaagaaagcctaagcaacatgttttgtggcatggatgatcaatctgggttttggccttggttggagcagcagcatttcaattgaatcaaatcaaagggagagagagagagagagagttaattaattttaaaaatttggatgtagtagtttttccctgtgaaatcaagagggtgtccatcaatttatcacacaatactttattatgatgatgagttcttaaattaaaaacccatgttttgataacttggtgtataaaataggatatatatatatatatatatatatatcaagtagaaattttctggcggggcttgaaaatttttatatgaatgaattaagggctagtcactttttttttcccactaagttggttaatgtaacaagttttcttgaaacttgagtaatgcaactgctatttggcgtgtagcatgtagcattaaaataacgagagattctcattctcttattactccctatcattttcttaaaccgattattaatttagcttgctctgaaatcatacccgcgtaatgtattctagaacaaaaatgtttaccattgctctgaagaaattaagaccctgtaatgatttgagctgctgatctcatcaatcagtacctgcaacgaacgaaatccaccccaagttaacaaagtaggcataaaaaaagaaagagaatcaaacacaaattccaagaggggaagaagacaagcagatggaagagtggaagaaaacaaagagttggaaatagtcattctcgtgaatgagatattgtcgattttgttgttcatgacaacataggaaaaaggggtgtcgtatgaaaaaaaaattaggtacttacttactatattactataataaaaacttcatattaaatatacaagtgtgtaaatcatgtttataatatttttttaaagttctttacatattacatagaatgtgttaaataaaacgtgtgtgataaacagtaaataaagaatttttgggatatgcagaagaacatttgggatttagccgtacccactttttattttttggagctgatcaatcagagtattcactccactgcaccaattttagggtttaatgggaggcttcatgtgatatcactgtcacccactatctggcatccatctaagtgcgttttcacaccccactttctgttcatctctttacttgtacactttattttcctctatatggatcatataatatggcagtgatgactgtggtcaaatttgcaccctgaagtttaaatcaaataataaattgtcacaatcttttagtcaaatttgcatcacgtcatgccatgcatagtaataatattagtaactttagctcaggtgaatatgtacatatatgcagatacaatataattatataaatagtaacatagtttaacataattttattgtctgagcatataatgaagagtttgatcacatgttaatatgtatatatagaaaaatatttattgaaaaaagtcgatcctttaaatgaatatgtttaactcagccaaaaaatatctcaagcttattaaaaaaaataacccgattaaaagtttgattttagatccatgagtgtgagaaattaaaatatttgttggaaaagatgttaatctcttaaaaatgatctcaggagattaattcttagctcttcgttgaaatataacctgaatttataaaaaaattgaataaataatcacttttgtctttcaatgcataattcattgacaaatacgttcctaaaagatgaaaatacaaaatttagtccccgaaaatataaaaaatgaaataaatatatccaaccgttaacttttatccatcaccgttaataaaatagtctacgtgacatagaagaataaatttatcactaaaataattatcaacgtgatcatgctaactaaattggacaaaaatatcagtaaaatatcatttttaaacttaaaggtcactaattttttgttagacgaaaatgtcaatatttttttattagaggaaaatgttagtctttttttttttaacctaaatgtcattaggtttcattggaccaaaaatgttaataagttactattattagatgaaaatgtcactaattttttattggacctaaatatcagtatgtttctattggattaaattgttacacttgaaatttcatttcatttaagggtaaaatataattttaggataaatttttgtcattttttatcgctacaagtataacattacaataatcacttaaaaaaatatattgacaaacacaatttaaaacaaacataataataatgataatattgattatcaatcataatttatctatcacaatagaaattatccaaaataaatattgtatcaatttaccaaaataaaacattattacagtgtatcaatcattacaatttttttcaaattaccctacaagataaatatatctcatatttcactttttcgaatcttggttattttattaacagtgacgaacggaaattaacgactggatatatttgttgcatcttttatactttcggggactaaattttatatttccatctttcagtgacacatttagctgggaattatacattcaaagacaaaaatgactatttacgcattcatattcctagagagtgggaagatgaaaatgtcaaaaaaaatattacataacaattatgtttctacgttggcaattagagatagtcacgttggcaatcatttcagtgataaattcgtcattctatgtcacgtagactattttattaacagtgatggatgaaacgattgatatatttgtcgtattttttacacttttggagactaaattttatattttcatcattcaatgacacatttgttagcgagatacacagaaaagtgactatttatataaaaaaatataaatttcacatattctactgttcatttacacttttggcttgcttctctctttctatcttttaaaaaaatcatatgatctgttattttcagagttttgcttggacggtatggagaccatcaacatcatcatagtaatggctatcgtaaatgaatcttgtcactgtcatcgatctattaatttcttccccttccagcacgcttcttcaaacatttttctaatcactctttgtcaaatagataaacgctatttcaccgaccctgagtcattcttttattttcaagtgtgaatgagttgttccctaacttgctaaatttcatgcaaggatgcttccctttttggctgttttaattagccacggggaatggaaaaaaaagaaagtgaatttactatggagaaacttaaagatacgagtaattctaaatctttcgcattattaacgaaaatatgttaaatttaatatatttaataaactatcaaataactataatttttacataaattgtagattttatctataaaataattttttaaaatttaaaaattgaatgattgaaatttagtatatataaaaagttattgaaatagaaaatttttactagtagttactcttacacagtaacttcatccacactatatatgttacatatagtgtggttaattagtatatgaaactttgaagtcaaattagttcttcttgattgttcaaaataagtgactgaagaaactagttacctcacactttttacacatttcttcttgtttattttcttatttaattttctatagatactcttgattaaaaaaataataattctactactcgagatatgaacagttatattgacaggaaagcaatttgatatagtcaaagcaatcgttgcatttcattttcaaacaaaaagaacgaagttctaaaaaaactgatattaggtgttcatgttcaacaatttatttataccagtgaactgaaagagtattgatttgttaatgaatgctaataaatggttcaataggacacatttttaattgaaacaacattgctttcaagcaatagcttcgtctgaaaggcgcaactccttgtaatttcggaaagttatgtataattctcattatgaaattggcatatatggaacctgaataagaccctaatcttacgcatggcttcattgtaaataccatcatatacgtaagtatccatttctgtattaaacaatacatgtgatacaatctgcattgcctcgaaaatatctattatatattaaagtatttgctggtatatgtatgggatcatgtgaacttggcttaaaaaaattagccagtggcggaaaattttggcattttgatgcatgacagtttcagaagccaactatgattttaatttttaagcaaagttttttatttttctaatttctttttcagtggacataattaaaaaattgtggaatcgtttggtggccacgtgcttgggggggttcctaattggacagttatcaaagggttgttagggttttttttttttgtgaagagttgcagaatgagagcattcccagcatgtttgggattataatgcccataaagagtgtggagatcatgtggtttcaatatgcaataattttgtagttattgctttgttcctttatattagaaagtattttactattttaatataatgtgtggattctgtcaacggctacataaacataatttttaagtagccttttagttggttacggcaactatactaggttctgatggaaaaagtttatttattagactaaattatccacatttataagtgcaaagttaatttcatctaacttcgaggttgatgctatgagttagttgttccatacatttgcaggcactatatttaataaggtgtatggtatctattcggatgagcaaacatgactattattgtaaaaaaatttaaagaaggacaaccctactattctatgtaatataattatcattttgttgtttgagatggaaaacagttggaaaaataacaagacaatgcccatgcacatatttgggtaggtatgagaagaacattggattctttagggtaccaaaaatgggagtaagttttaagccacctggtccttgtgcctgcacatgcaatttaagtgggttccagtcagctcttgttgattctatcattctatgtattctattagatatttagatagttttcgttctcactcacccaactttttttttgttttgttattcatatatattttagtcaatttttttgttttttacattttagtctttaaatttactaacttctgtgtgtattatcaccttaacaatactatattttgaatgaaagatcactataaaagacaacatgcatggaatgtgcttgataattatgggactaaatttaaatgaatcaatttaaaaaagataatttatttagactatttgttccaattcaatcatgctttgtactttggtataaactcaagtcattaagatgagtgtggttatggaaaagatttgaaggttgtttggacaagtttctctaaaagcattcttaggatattatctactactaggaaaattttaaacaaataggcccctttaatacatttccggatccgtccctacaaacatgccttgattttgcttgtcatctatcctcctacattccttattcaaacagttatattatttttctttttttgtccacaacgtacattgcctctgcatttttttttccacttcaggtttagggttgaaggatgtggctgggatttagggtaagtaacagccacattcatgtacttgcacagttgcaccttcatttattgttttggtccaacttgaacaaaaggcccattggcatatgggctaaaacgcacgttcttatgagagcaatatataagcggattattagttaatcgttggatattttcaggccacttagcatttagtgatttatatgaatcattaatatttcctttatggactttttccattttttatatggttccttgcttaaaaaacctaaaaactactatttaaatacaataataacactaaatgttcaactcaaaatttcttctgagtgctctagccatgttctattcttatggtccagttcaatttacattactttttccaaaatatatccaaatttcttcataaattttttacatttaaaaaaaaaggtagcagaacagagagacacctccaatactactaggcagcataccattgacattataatataggcctaaattgcaaacatttttatccagttgcagttattcaattcttccattcataaagcaccaattggtgtttacaaagagaaatgacaatagtgtgccttataagttagctattcttacttttgtttatcataatagataatagatgtcgaattgaggatactcttaaactagctcctaagcgtagagaatcaagcaaaattttagtggtgacaagagacattaaatccacttccataaaaaccatatcttcaaccactttatctactcacatgtactcataagttattacgaactatcaaaagttcagtttgtaagatggaacagacttaaatgttaccaaaattgatgaagtcccagccagactgccggtgaatataaatcggtttagttttgtcaagcttactcggcttcaatggttgttctgttaatttcgttttggtaatatatacttcctttatttcaaattatatgatctcacagctattaagaaaatattagttaactttttaatataccatttatctctctaattaatgacttatttactcttttatacattactcacactaagtatgattaaaggtaatcttgaaaaaaaaatatttattatagcattagttttataaaatagcatatattttgaaacatttttttctctaaaatgttatataacgtggaacgaaggagaaagtagtatattgtattatctcaataatagtactccatataagggaactaatgacataacacaagagtctgattttttttttacactcacaaatataaaatatctcattgacatacttattttttttctatctttttgtttttattagataatatcgtctattatatttatatatatattttttctctcttaaggtattaagtaggattacgtgtggaaaaaatctgttttcttattggaatattgggcttggcaatgcagacttgtgagatttaaacccatcgaaagcattgggcctctcaacaacaacagtaataagtggtcattgaccagccacgtggctagatgattgccacttaggaaaaagtggtccccacaagtctttgaagatttcattacctgccactcaaattcctcagttctaaactaaacggataacacagttatagtcacagttacttccaacacacatggcctccattcccctcctctcaccacccaccaccgccacaaactccgccgtcagccacctaccctcctccatcacctccacctccagctccttcaaaccccacgccctccaccgccgccgcctcacgcggctacacgtgtcctctcccacctcctccaccccttcccccaccaccacgaccacctccggcgagaccatattcttcgacggcggggcccactacggcgacctcgcggcgaacctcctcctaggtttcaccctcttctggctccccctgacccttgcggcggtatcacgcgccatgtacctgcgctacaggttcaccaacctccgcgtgagcgtgatctcgggcctgacggggcaggaccgcagcgacttcggctacaacgtgatcaaggacgtgcaggtcgtgccgcgcttcatcggagagtggggcgacgtggtcataacgctcaaggacggcaccaaggtcgatcttaggagtgtccccaagttcagagagatcgccaagtactgtctcctcatggctcaaaaacccctcgtcttgaaccaaactggacccaaagccttctagggaaagagactcaaatgaatactaaaatcaggtcaatcccacaattttacactctaatttaattcaaaaactttgtttcaattcactttcttttcgtttcatactcgggaaagcacattaatttggtagagtggaagtgaatagaatggaagagaatttaaaaaaaaaaagcttaataaaagtgtgggattcacgtatattttttaaattttctctttctttctcttatttcttcgcaactaaactcacctggtttcgtttcgcattctttcttatgcaccttctgcacaatcccttacaggtattttggtggtgttctttcttggggggtgagtagaattatgcaaatatatgctactgcttgaaatgaagttagctactaattgttacagcacaatatttcttattcaattgttctgaattttactatgtgtgccaattctacttctttacataggattaaaagaatccaacatgaacgtgaaatgagcaaattatagaagtgtacttgaaactacatgaaacaccaaaacctttatctttaataatatgaatcattccaacaaactgcttcacttcgtcatttgtactcattgtaaagcttcttcatttacacttcttattcctacaaaaccttgtgtgtttgattctttcatttaatgtatatagtcagccattgatatctgcagcattgtatgcggtggaatcctttgaactttttcatcaaactttcggtagtgtttatttatccattgagggataaattccagaacacttcgcaagggaacaagctttccgcaatgttataaaattaatacaggaaccagtatttcggaatataataaatattttggaataactgattcggaatatattacaaaagagtgtaaaataacatattacataattcgtaacatgaactcaatgtttcggaatatgttttccggaatacaattattgtattccatagtacttaatagttaatacagaataatgaattacatggtacagattatgcaatctgtaattcacatcctttttgcattttaaattccgttatccgataatattataaaatcggaaaaaaaatgacaacttacaaaaaaaatgacaattctgaaaattataaaattaaaaaaggatgcattgtgaaatttgtggggtgcaggaaatagctgccttaaacagaagaattaaattttaattaaaaaaaggatgcattgtgaaatttgtggggggcaggaaatagctgccttaaacagaagaattaaattttaactaaaaaaggatacattctctctttcttttaattaggagtattctactataaaaataattaatgaaaaaatattatacattttctattttcttttaagttgatggctaaggtaaactagtttatcaaatagttttttttttttttttgaggatcttgtgcattacttcaaaaaaattaagaaaatacagaagaaaagaaaaccatattttaggcagcttctacggtgaacccacaaaataagtggttctccgtgaatgagtatctcaacaccagatatattataaacaatggacagtcaagatgatgaaccagaaacttgacctaacagttaaaatgttttaaagtaattaggtttctttttaaatcctttctttcccaacccgagaacttcaaaggcaagttatgacgtcttcaatgaatctgcggattctagatcctatgaaactccaactgggcgtatttaatactacctccaattttataaatagataataaatcatatttttctttgattctaattataaataataatgatcagattttaaatttatttaaagttaaatgtcttctatatcgttaatttattgttaattctatttattagacattcactcatcgtattaacatttaaacttaaaaaatacttttaaaataaaatttaaatttctaataatattaaatgtgaaaatctcttttcttatgttgatgatttgtaatgttatttgtatatagaatcagaaatagtattagttactatgaagacacaacttctattgatgttgatgaatcagattcattccccttctcaaccatttcattgaactccttgcatccgaaggaaatttgataataatataatgtttgggttcattaacattccatatcaattagaaattatgagattttttttaaaagtatatcacaaattcatacaccattagaactctctcgatcaatcaatttgaaaagaaaactgtcgagaattttttgtcaacttgcagaataatgttttaataggtaattaactagttattactgtcaaaggcaaaaagaagtagtactcccgcttcagcaaagtcttcactacgtgttttgtccctttcctatgcgcctccggcacaccttcattgtctcgtccgccgaccgggaaaacatgacggtattcacggcgtcatcatgagcagtgatctactcccaacagttagattttgactcttgagagcccctcagtactccaaatagcacccctgtgaatcatgactgtaaccatggttttttccaaccatttgtctcatatatatatatatatatatatatatgaggtttattagtaattttaatgtttttataaaggatttaatgacttgtataaaaccgatcaaatgacctatttggtcattaatatttttttaaaagaatttgatcatctatctattaaaaaatttattttgatcatttatattattaaaaatgatcaaaatagtatcattaatgaaataaatatattagtagctaaaaatcgtcacaaaatataagtttttttcttgagcttcctccttctcttgctctctcgtccctttcttcttcttttttttttctttcttcacccaccatgacaacaaaggcatcaccaacaaaagctacgataaatgaatgaactccttttttcacatgcttcaaaccctaaccatgaaatggttcaaagtggggaaggtgagagcaaaaaaaagaaaggagaagaatctccactctcaatggtaggggacatagatttgggaagggagagatgtaggggtgggggtttcttccccatcctcttaaataatggcgaggggggcagggtttgtggtggtaatacatgacgctaataaccatgacaatgaagcgcgcaagcaacgtcgagagaattttgaaggagccaatgacgaagggttagaggcggaggagggaggatcgagtggggtttgtggatctcattatgggcgtagtcaccaaggacaacatagatgttgttaagaaaacaccaattttaaatttctttatcgttgaaaataaccgtggtgacaagaaaaatcattctgaatcaatttaaaaacatgaaagatcaaaataaactttttaaaaggtaaaaaatcaaaataaataaaataaaagaccaaataaataatttgacatttaaaattggatttaccttttatatgcatgtgaggttatatatatacaataaaaaaatttgattcatgagtttggggttacgcattttgttttaggggtataggattctattatgtaattgcaaaggctgcatcaatcttatcaacttgtaatttgaactcttttgggacctgataaaaaaaattgaattctttttgttccacaacttgtacaaagttggacaagtattaataacatattgttttgcttgattaaaaaaaaaaaaacctttggaggtgtcctgatttcagaggttgaactattttcttttttctttggttaatctacgatgaaaagtttaaagatatgaaaatgaaaagattatgcatcatcatttgtaaatttttcgaaatattattttggattgtgtatgaaatttttggtcgggccttgctattcccacccctcctttctcttttcaccccatacttttttataaaaaaaaataaagaagtaaaaagtcactcttaccttgcttccaatttctaatttcttacaccacctttccctccccctctgttatcgtactccctattaggctattacactccccatttcatttaccacacacttttccccctttagtattgtttccactcactagcaatctcatcactactgtgttgtcgtgacagactcattgcaaaccaagtctcattgccccaacgtaatcgtctttggtgagtttttttaatgtttacattcaacaaaatcacaagtgtagatacaaaatataatcgtgatttgtggactataacataaaaaatatagacaacgtcaaaggttaagtttaattcatgttaatgaaatgggtcttccttagttttctaaagacatttgtggactataggagtagtcaattttgaattgtcaagtcaaaatcaccccttataagatttgtatgtaaaaatcttaacttgaaatcctctatgagatcttcatctcagcccaaaccaagcaaaatgaatgtctgaatgagactaataaggatttgtcatagggtgtaaagcttgacttccaagattgatagattggtcatctacagcaaggcattggacactcaaattgctcaccaaattgcttcttgtagactagtagtgaaatccgaaggagcattgtaatgttgaaaccttaatgagtgacgactaattagagggtcctaaagctaaataggagaaagataagcaagaagggagtgaggaaaaagaaaaacccaagacagaacctctaaggggaatatcaaactatgtaccccacatttcttgtcaggataaattggaaaagatagagaccctgcttaagggttaagatcaaaagaaaaagcatactgcacaagtaggatctaaaccatttccctcattgcttaggtgtgactttctttgaccttactctattgttgaaaatatttggattcaatataagataaaacttagagaatggtccttgaaattaaggaatacataccttgctctataagtatttttcccaactccctagtttcctacccccttgctacatagccacattacctacaattatttgaaaaaaaaattgttatccttgataccactaattgatttaactagctacatggtgtgttatgccttatcagtctaggtttgattgatataatttgttgaactacaacttcgacacattacatccaaaaaaataaaaccttataaattctttctttttcttaggagattattgtatattttgtttcatatttcaaaaggttaatatttctaattaattaattttaaaaatattttaaaatcaacttagtgtttatccaaaatatagatatttttttatctttggcttgtttcacattttctttaaacattacttaacactatttttttattataaatatctatacttccaaatctttctcttcctcctattcatgtatatgtgcttgggtacacataaaaaagtcttactagtcttattgatataattattattgaaaccaatcagttaaattctagaaaattagtacattacatagataagtcttgaagatagtttgaaattacacatctcaagttaattttgttcataatcaattgagttcatgagttcaagattggatcatgattcatgatttggcttaccaataacaagattatcttatttttttaaaagtaattttttaaaagtgatacattgatttatttaaagaacattgtagttataacttattgagtatatcttctaatttagtaagttccttttctaaataaaattaaatgaaaattaatataaatttaatgtcttgttttttattttatttttaaaaacattacataattattttaatttaaaataataaaaaacatatcattttttcttatctttttcaacatcaatgaaatctaactcgattaattgaacaatgtatacaaattgttgtagtattgaagtttggagtcaatccttctccctttgaataataattttttttttaaatctactcttttgcttgattttttttataaacattatacaattctcttaatttaaaaataaaatatatcattaaaaaattaatttctttcaatcaactcagatggataaacatgcgatttttttttaattttaaaatcgaaaacactttgtttgttgatcgtcggtgccatttattacggttgttcttattagaagattatcagtatgtagggcaggatcgagtttcatcctttggaaagtgctattctacgacactttagtttgattttcgaataagagtttgtcattttgtcacatcctatttccccacttcaatactctcaaacttatttttgttttctttcaaatttctgttataagttgataatgatatttattataaaaaaataccaatgattttctcttgtgaaagggtctgcatgcatggacaccataatgacatgtgacacccgaaatttaaccccttaccccatccaagttattataattagaagccaacaaagctttcatctcagatcttttccaagattttgctgtaaaaataacttaagaagtacaatatttttagtttttatttgttatgctagctgccgtgcttaattgatttttatttagttttatatataaaagtaactagtcagattattcaaaaaatttaattattaataaaattagactacttaagaatacatttttaatattattttactaaaaatttagtcttattaaaataaattcttatttttaatttcttaaataatattttaaaaatgaatttatagacaaattaattcaacctttttttaagaatatagtaggagtaagttttaatgaaacctctaaaaaatcaccaattttatgtttgcttaacggttttttaattaattttgatgtatactaatttttatttttaatatcaaaatataaaaaatatatttggtattattttaaaaattatagtaaacattttttgaaaaattacaaaaaataatatttatttcacaatgtcaaaattatatttttttataactgattttttttttttaccaattcattaactgattgaggtgtcatttagaatttactaattcaatcacagttgaattgtgatcaaagcagtgaatttacacaaggtttacacacacatatataaatcatttgaaatattgtttgataatatttaaaccatttatctaatatgaatatgtgcataccttaaattacatataaaatattgaactgttgcatgttattgtttaattaacacatttaacataatcatggtttttgaagaaaaaaaatgagatctttgagatttaagaccccaataaacaaccattcttgtataggcagattctatatgtaaaaaaaaaaatcatcatggaaattgggtttaaatatatttacataatttaataaataatcaaattaagagtctatttagataaacttatcaaaaagtacttctaaaaaagaaaaataagaagaaaaaataaaataaatttctctataagataaaattagtgtatgtatagattaaaaatcatctttcaaaaaagttatatgaaattcttttaacaaattaatccatgcataagctaattttaaatgcattcttttataactttgtgtaatctttaaatgcgtgtttttacttatcttaaaactatttttgttttccttaaaaaaactaatttttttaagcaaaaaatgatatatatatatatatatatatatatatatatatatatatattaattaaaaatcccagctaaaacattttttttcaccatatatatattaattaaaaaaataacaaagtattttgtatatgtattgtctgagaatcaaattattgtttgtattgttatgaaacctaattatctacaaaattggccttgttaattttactttcagtagtgaaagttctactaaaaaaaattatatatatatatataattcaaaaagtgaaaaaaagtaagaatttcagttttcttaagttatatactctaattatatatatattttttaggaactatgcaaaagaatttctcaaaataatacaaaatatatttttggattttgatttaaaaaattaaagaattgccttgattttttatttaaaaaggtaatatttccacacaaaaaaaaaactaaaacaaacaggttataaacaattaaaaccgtgatttttaaatatattgaccaacatgtagtaaaattgaatttgggttctttaagtaagattttgaactcagttttattatgatgtgaaaaacttgtttaggaaaaaaagttttattataagtgatctacctgcttattataaatatattttcttttaccgatatggcatattgctttgagtaaaattgagtttgaattctttaaataagattttgtacttgagtcttatgagaaaaaaaaaatatttaagaggggagatctcacaataagtaatcaatcagattagttgataattattgttcatcaacaaaatcaacaaaagttaatagatatttggtaccaagtttaaaaaaaaaatattttcttcttttcttttttaaaccaaatctataacatctgcataatctgtaatgaaaaagaggtcggttctttagttaggggtcccaggaggatgtggaagggaatgattaatttggcagacatggacttcagctaaataggctttaaaaaaaaaaaaattcaatcaagaccacctacccaattcaatcatatacttctatgatctctctattcagctaagttctgacaaattttatgaaaggctcctgaaaaagggtgcaatcatcagatccagctaatactcttgcctcggttagtcctcctacaatgggacattgattctttgtttgagattgcatgaagtgttaacattgcaccgcaacttgatgaagtgtgtacttgcattctctgtttcaccataattaaaatcaactaaaggagctacatgtaggtgtgtaccacaaactaggtggggttggcaagagaaggtgcctctttgaataaggggttggaattacttgtgccatcccatttggagacaccttcctggaaatttctgaatccgtttgagagttgtttatttggcactgtttgtggcacattggcactagttcactacaccttcattaatgtgatatagctagcactaaagttggtctcttgtagaacccccctgtcatcattttgagttgttgtttattgttgttaatcttcatttgaataagtatttgacatatagcgtttttgttaagttaacgatccaattgaaaagacatgtttggtaagatctaaagggcttcaagcatatatagagttgaatattcattaaattagcgtggtttgtttcaaactcatttggtaattggtccttaatgttatgttttctttctgctagggtcaacttttatcctaagacaatacaaaaatataacaataataattgaattttggatacaagggtctaacatagttgagtaatataatgtgcttgtaaattctttgatatttgagttcatttttatagataaaaaaatgtatttattatcttttttatatttagttttttgaaaaaaatttaatggttttaattctttaattattttcatctttaatctaatcccttaacaacagtaaaaacaaaaattcaaaaaagtttaaggaataaaaagataataaattcttaaaaaaaattcttgttgaagttgattgcatggattaatggtgtgtctagatgcgtatttgaaaactcattgaggatgaaaaatcgcatttggaatatggaaattataattattagcttttgaaaataacattcaaaacagaaaatcacacatatgaaatgtaaaaccaaacacattactaaccattattacgtcatccccaattcatgttaaagaagcgagaatagcttcgttagatgcacttaaattgatatataacatgtatctaattatgtgataaggagtatcataatattttatttttaatagttaatgtatagtttttttctatctttttctttgttattaacgataagattattttcattcgtgatatttttcttaggggtaaaaatatgttaagtgagaatagactttattagttctaaatctagtgttattcaaaatacatgaagtgagattggcatgtatgcctatcattggagttttttaaatgtctatagccaattttcacccctactctcccaagtcctaattaaagcttctttatgtcttttccatgcacgttcaaaccatctaagcgaaaatttaccatacttttgcaatatatgcaatcacaactttctctttaattaatatattcattcttaatcttatcttgcctggtatatcactcatccaagagactagaaaatggacacgttacaaaatttgatactagaggatgtattttcattacaaaaaatatccctttcttttaaaaataaaacgtctcaatttgttcggtagggatgggtaagacaacgtttaaagagtgaaaatcacgatatgattacttagcaaaagaatacaaaggatggaaagaaaatgcatttgacaacaaaggaatgaaaatgagatgatagtgcaatatcacgagtccaaacaaaaccattttcaattatttcatttctgctttctctagcaagcactgacaagtaaaaatctaaacatttgcatctcttccactctcgcttgttcttatcctagtttttacattccttttttcatctcttaagtcatttttaacttttacccccataatctctttgagggtggatttaggttttaaattacaaaagaaaattattaactatatattctctaaaacactctatagtagttactaaaatttattagaaatcaagaaattgcatgactctcatatcttatttaacgagtcttactaatttaaccagtagtagatcagagagtgtattaaacaaaattacaatggaagtctacactagtcattgttatcaaggttttaaatcgcagtcatggttatagtttatcgtgtttcttgatattgctggaaattacaagcaaatgcagtgtcacaaacacccccaaaaaccttatgttttggacaaaatcgaagtcgcgaacactttttttaaaaccttagattgtgaaagtcatattagagtagtgatccaatgctcatgtaacaatttcgaaactcccctgcatcaacctaccaattaatcactttcaccgaagctattaaaaatttaatacatgtagcttataggtccctcaattcccaagcagtgatgattaagtgggcagtggcaagagacgatattttacacaagtgggttgggacaactatgcatctccttcaaaatgtttggactgacaaaatagaatcaagtcccacacttggtcattcccatactttcctcatcaatggttatcatctgatacactctgtcagttcaaaagaaaagaagcaaaatggaccaacctcaagccacaaataaaggaactgaaaactggggttactgcttcattgggtcttttgaccatgctccagcagtcctcattcctagttttaatttccctatacataaaaaaattaaaaaaataaattaaaaatagttttttttttaatttttattcctcagacaaaagcaaaactatgcagcagcagtgtgtgcctttgggggtgtaatgagaaagaaagaggtgatgtcaagtcatgtgtgtagcagagaaattgcctgcctcggccatatgagctgttctatttaagtgccttctttattgaaagatgctaaagagatagacccatttggaatatgacagaatgtttttccaatcctcagttcctctttggcactttgcagagttctgcttagctattaggccccaacactcactctccttatccaaagcaaccctcactcacctcaccctttaaagcttaggtcaaaatcaaaatttcattcaacacaacatgtaatatatagcattaatcttgttatcacaactcatagcttatacaacaaacatcattcacctattgataaaaaaaaacactagcaacttccccacaatatatatattaatcaaatggtaataatttcatctacttagaggtcactatttcgtggccattaagaaacagcactattgatttatacttaaatactcattatgctggcgggaatttaatttaggaagtgaagaaatgtcactttctttgtacatgaccaaaaaacaaactttctcgattattattggattccctttaacttatactatagggtctgcaactccaatgaaattaaattaggtaatctcaatatctttatgtttgaattcaaacaaacatgtcaataggaagcttaagctggtagtgtcacaatcatcacaaatttgttgagcacatcaattggaaagattgttgaacaaatttgtaggttttgaactttgaattgaatatatcatcataaagtttatgaaatgagtgaaccaaaataaaactttggttttgattaaataatagtataatatatttgggcatatatacgtcatatataataataagtagaatggtacagtgacaagataagtgtatgatcacaatagtggttttctgaacagacagaagcttctgcatattcagttacgtaaaatcagtaacataatttgaagcagtgatgagttgttgaaaggaaatacatgacatgagaatgataataacacgggatgggaaggaatattattatgattattattatcttcaaaagggatactgcaaaaagaaccaaactatgggaatataaggagggggcataggattcctaaacctttttcttttgcaagagcgtgctaagtagaaaagatagggagagaaagtgagtgaagtgaaaaatccacagccaaattgaaaaggtggctctaatatcaaaaggatggttcccacaaggatgtaggaatcccaagtagacgaaccccaacatctacataaagctaaaaatagataaaatataatagcatgagcttcaaattctgttccacacgtggggcctctgttccctgtttcttttttcatatgggatcaatcaaagaaatttttttttccttttgttcattgcgttagaaatggaaataaagaaaaaaggggggattttagtagggacagtactgtttcatgttgtgccaagtttgattttggttcatgccacttgtaatgcaataagctactttagattagccaagttcacattcattctgccaacttcttcagcagaaaatgttttttttttcaaatttaattacatcttctaccttctttaacaattaaccaccttattgtattatacaatttttaggtgacaaattgggacaattaatggaaagtaccattaccattacaattacaaagtcttatctcattaagtgaagtcaactacatagatcatacaatgtcattcagcttagtaaagaccaaagtttcagaaatgttatttgtcataaaattcctcttgataactttctctaatatacttttttttacctccgtctcttcttcataggactgaaaaagcacttaacaatatgaaattaaaggaccagtcaattacttaattcatcattttgctttgttaatagtgcttttttattaattctctgaaaaaactatgctcatccacaaaataggccaaagtggctctgcttttcatttggccaatttgacttagattagacacttttgaactatatatgcatttggccttgcattagcaagaaaaagtgatatagattagttatctccattcttgttcatgttccagatgactgttaactgaaaagtaaccatgtgacacaataaggtagtttatagtacttggagagagagagtgagagaagagggataacaaacaattaaatgactgaggagcataagtaaaaagtttagctagctgcttgtacttttcttttctcttttttttttttgggtatgtggttgttgaacaattttcataaaatgaaactttatacgtagggtaaaacactctctcttttccagtcttctttttggaccttcttgtcctcttttttggcaagtccaaattggtttagctaaaagggcatgaaggagcgtaaacaaatcttaactgcggcttttagaaagaaaagttgagggattaagttgtattgaatagcttatcactggaatgtcaaaaagaaagcacaaacaacaagacaaattaatctgtacttagccaaaaattaaacacagttcacatagtatcccctatttgaaaaggcagttcaccagacaaagttgtccccagacacattgcttttcttatgcaagaataacgaaggaccagaaaacgtgcttaagaaaccaagtgcctgagattatgtatcatgttccttcatgcatatttggaccctctatcctgtaaattaaagctgtttctgaaactctatttatatatatatatatatatatatatatatatatatatcacatattcatattccctttgttagctttaattttgtttttttctcccttttccacatgctttttggttttgttgtattctatttctcagagaatttaagaacgggaatgattacttccccatatatatatatatatatatatatatatatatatatatatatatattatcaaaatatataacttttccaaatgtaaaacgggtaaagattattagggacctgtatttggtcatagtaagaaaaaaaacaaatgaggccaagcaaaagcaaactttacactcccataaaccatagcaacacaagaagttcaaagatggtattcgctttagattttcagcagtttcactgtttcagattgatatatgaccatacacataggccatgtataagggggtgaaagcaagtcatagtgaaaacaaaaggtacaattcagattaaccaaatctgttccaaataaaagtgacccccctctgctgtgacctatgtggtcacaagtaagtgtaaagtgatgagatagtgaataaaaccaaaggaaaaatagagtaagttctggtaaaagtaaactagtgccaaatcaaatgtctaggggattctccattaggccaactaagatgcaagttatcatatggtcattgaatattagtagtacttaatgattcacatttatttctttttgttaagaatatatatagtttgaagagcctatccagaaaagtgcttaagttttttttattatggtatcagtacgaagtggatattcttttttcgaaaacaatgattaatctttgtcgggacctatgaatacataagataaatatttttcttctgatacgatttttatttcatacccaaagattaattaagattcaaatcctgaactactttattaagagagaaagttactaatgtgtgtctacccggttgatcactttttttctttcctttatgtcttattcattaattttgatttttcttccctgattttgggctaaagaaattaagggctcaaagagtggggacacttggcaatatgcaattgattgggtggccgctggggtttgacatgatgaagggcttataaaaagaatatgcatacaagaccctccccatccaatcaaatatcaatctctttgggaacttgggcctctccactaagctcctaatagtctttgccatcataatattgatttaattttggtgtcattaggctcaatgacacgggttgttaatctgtctctagctgatgatattagaaacttataccagtttttttttgcctcaatattggccatttctacgtcactaaacatactttatataattatgttcaaattggtatcacctcttggacagatcgcaaggatgctacacaagcaacaattaatttctcaaacacattcgagaaatcttttgaaaatatgttacagataagcattgatcgatgcaagaacctaaaacatcaaacatcattaatgatgggtccttaattaataaaccttcaattagctagaaaaaagccagtgaaattataccaatttccccacttggtttatcattatcttgattttaatatttcattgtggaggggtaggaaatgtccatataaattaaatagacccccttctaaaagtctatcaaactggccatagtatttgaaaggttataatcagtccattttttgaagggaccctttaatacttaggatatgcaattttgccaaactttcctgtacatgtcatggccatgactattatgattctcacaaaacaatataaggtgggaagttcagacactcataaaatgccattccgctcccaagtgctcattacaatttccacaacaatgacccaaattctcttcctttctctctggctttgcatgtctcgtcaccaatttcataactgtagatggtacaaaaattagaattgctaggaccctatgtaagactactgtataaccattttggccccggtgattgaacgttttgaaattattctattgtacacctgggaattattattattattattatttgtttacttacatacatgcatcacatatttatatatattggattggatatatataatatgaataaaattcaaaatacaaagcaatgggtccaattaatcccttcgcgtgcgatttgtcaaagattaaatcaatatcaacgcgttttagtagcaactttatcatatattcataaccccattaacacaatattaacaaatagaatacataaaagaggaggctataggttgatagggtcaagccaggacaaggagagaggaccaaggactaagtgcccatgttcaatcaatagccgaaaaatgacaaattcgtggcttgtgagggtgtgctctatttgaaaaattttaaaacatatttgctctttttttaagcatagggtcatgtattgtgtatactatatataagaaaaacattttctttccatagggttaccacaaagtgactagacaaaatatcaccgactatacccttatcactacccctttttcacctaataatttttatttaccttttcattttcctttatttacttgaagttcagcttcagattccctctactaaaagcatctgtttctaaatgttattcacattttttcctacttacagctcctttgtatattattacctttcctctttttcatcctctttttcccctttcctttgaacgtgtaattgtgtatcatttcttactcagaagattattaagtaaattataccaatttatttatttgaaaaaaaaaatctttgataggtccaatttgtatgagtagagacatgggttttggccatcaaatgggtctcttttggcgggagatttgggtgtcaagacagggaacaatgaggtggccattttgtagttttatgccatccttagggctccaccatttcaagattcaaaaagctagataaggtggctctcacttcacttgtgcagtttattagtatgcactctctttttgaactctccacgtggcacaccaacttcttgtccacgtaggaaatggtggatctggtaggtaaaaccgttggtttatgaacccaacatgggaaagttaattaagatatcataggttagtaccgtaaaattatgtttaattaataaacactattttttaaaatagtttttggctgcacattgaagggtttagtggcttggctttttctaccaaacatatgtgctacagttacacatactttgtctacacctatcatctatcaacaatgactacatatagaaatacgttagtagtattttatttaatattttaaattgaggtttatcaaataatcacccataggctatattttgaggcccacgatgctacatagtgtgtcaaatttgattaatgaaagtgcaaatctatcctaaattccagcgttgttaggtttaggtcatatcgctgtgggctcatgccaataccctctctttccgtcatgttgttttattattttcaatttaaagcaactagggtttctttaattttgggatgtccatggttaattaaattgaccttaagctttaattgcgtcatttattgtaatggtatgttaaatcattggatgtagcattctttatcctcattatattaggccgaaagttggactttttattatatatgtaacggtcgaatttgaaaatattgcattggatctttttgacggaaggtctagaattagcaaaacagagaatttctaacttgaggaaaggctggtagactgtagacttcatgcatattgtgcggttgaaagcaattcatttgaaaaatatggcaagagagaacacttagaagattagttttcaacacatcagaaaaatgttagcattcccttacaagttacaagggataactcaaaaccttggattgagaaacatgttggtaaaacaaatcttgttggagaaacttttacctagctaattaaagatgatgttggatatgactttttcgctagttatatctttatgataaggataaattcggataatgtttcaacaaatttttgtaagggaacaaaataaatgacttcaaaataaattaaaaaaatcatataaattaaaatgaatttatgcactacagtttaagaaaatttaaaaagaattcttctaaaaaaatttgaggtacataaattaattttaatttatgaaacaattattttgtttgattttaatctatgtcttttatctccatctctaaattaaatttcaataaaaaaattatcaatagtcaactttaaatcaatttaaattattcattggacatctaaaatataattatatatttaaaaatatttatttattataaattttaaatatataaaataaacatttatccaatataatgcatagaataaaataccagtttctaataaagtctagacacaacaaaaagtcataaaagtattttatcactttaacaccaactaaacagtagtatgtgtaagtctattaacctatttaaaggcttgtttaatattaaaaaatttaaataggtatgacatatcattaaatacgctaaaagaatatatagtcatttggaaaaaaaaaacttagattgtatgtctcatagcatatgctataccaaaaatatcaatgaaccttattattgaaattgtttgagatatccgttttagtttctaaaatctatttcttaattcaaatcttatcctttagatttattgcgatgttgaaactttaaatgtaaaacaaaatatgatagctaaaagtatttttacttaaggaatggaacaatgacaacaataagttggttcaattttataagagttgagtagtctaacatatttatatgatataattttagttttaaatcccgatataactttcaagattacttatttaaaagtctatatattttgtaatagtctctaagtatatatagcataaatttatcgtctaataagtttataggtttgattccttatgtatatctataggctcagcatttaaaaagataaatgaatatattatttaaatgtattataaaaatttaatataataataatgccaataaaattaaaatataatttatatttacctataggtcggtctattaggtctaaaagacttttttgaatgaattaaagtttaaccatttttataattaaataggcttttataaaagcattagtctaatttatttcctatacaagcttggcatagcttggtctggtataagttgagtcatagatccttattgcgagcttggcttattttcacttttatccacaaatgccaaaatattaaataaatcaattataagtctaaagaattgtttaaatattttacatcaatgcaaaaaaaataaaattaatgcatatcattttttaaattatgaacattaaatatcccctaaaagaaaaaaaaatggattaacgagttggtcaatccctactcattcctacccattttctttgcaagttaagtgacataggttgaaatggattggtgggttgaaaatcctaatttgtttgatgaaaaaaaaactaaatatgttacttcatcaaattcaaacgattttatcatccctaaattagacctaatttattttttggacttgtttgctagacacgataaaggatatatgataagataagttatcaaactttatcttaatccattatttggtgagtcaataggatataataagacaatcttaatactttatcgtatcttatttgccaattaacaggtagcttacttattaggattaataaatattttcctatatcacctttggctttttttttctccacccatttgtttctaactttttgtgtgcattttattaggactcttattggtagcttttgtgttccttagtctccgatgataactcgtgcatcaagtttttgtttcgcatccttaatttctaacaataactcataagggtgacaaagaaaactaacacatccttataacttaccatcaattcgtctaaaacaggatatagagcaagtagacttgttaacgaaaagaggattaaaaaatacatgtcatctcgtttagaagtgagttgaaaggtcataaaattacatgttaacttgttaaaatcttcctaaaaaattaaaaagtaaatattaaaaataatattaattcatttttttcacacatcaatcattttaatttgtatgcatatacatattatttattttaaattacataaaaagtataattttatttatattatatcaaatgtgtgtttgtgtgagagagataaccgttttatatatatatatatatatataaattattggaatgatttatacttaacgatgacaaattataaattattacaacctctactaagtcatttgtctcaataattatgtgaagtcttaaaatgtatgaaatataaaatatttattatgaaacagctgttatctgacattaatcatagtgaatgattcataaaataaagaaaaacaattaatattatttttttgtcattttctttcctatttgaaaaattatatagaacagttgttgataatttataaattattttatttaatgatatataaagttttgttcagtctccaaaaaatataaatttttgttctgagttttctgttttataaaaatggtagaatttttataaatgactaacaatttactcttgctgatttttttttattatttatttcaaatgattagaacccatacagttaagtagtgcagagctttatccaatctcttattagtagtcgagtttactttatctttgacttttgatttgtaatattttgtaggcgtataatcataatattgacattatcctttttaatttgtaaacaattggtactagtaaataataggaaatttttgaatgtaatggtagcatgttaaacatttgagaagaacatttgaaaagaaaagaaaaaaaaatacaataatcaacacattcgaaactatttatgtttcaatatcagacatcaaagccatgtattcttgacaacataatggattttggaactaggaatgcctgcgacttctagcttgaaattcccatcaagattgctgatggaccaattattaaacgaatatattaaggcaatacacacacacacacacaaatcagcggactttattagtccgacattttcattagattttcaaatcctccatcgacaagataattgttaatcattcaagttgaattaataaaaaaaatactgcgtactaagacagtagtaatatattactcaatacatgtatgtgcatctacatgcttattttttaaaaaatagcatttaaaatgtcacgcaccaatgggtgagaagggtagatgtgagcgtaggaattaacaaaattttcaatcctttgggagaaaattcaaaaacacattgcaaccaatggacaaaatccttaaacttcacacacacatttacaccaaattgagtccagccaccatttgaatccaaactttcctaaacaatggaggaaaagggggaaacaaattgaatggcacattcaactatttaaccgtgaccaaagatgtaagataaatgaagcacatgatactcacgaaccattatttattctcaatgcacgcgaaagtttggtcacgacgcttcgctagctagctggttggctcactcacgcaccttctcatgtctccttaaaaatcacaaaaattcaaattacaaccttttgcatatgtgaatatatatatatatatgtacacacacctaatataatagttgcatcggtgtatgatgttatgttaggtcacaagtgttgttctctttaaccattgcagtatattcatcatcatatgttgtggtatggtacctttgaacctttttttttgtccagatgaaattgatagcattcattaatttttattaaaaatttaatcaatcacttttagttatattttttttacttataaacttgaatgaacacattatttaaagaaattaacttcaatttcactcgcaagaatcacataatgatcctttgaagtttgaactttgttcagtgctgcaaactacatagtggacattagtctacgccgccatgatatactgcacactgcacgtagctcatgaaattcagcgttattttcaaacttcccttcatacccgcgcactaagtattatttttattgtttatttattgttgtatactctatttttttgttttgtgtattttttttttctagtgtgtgaccgttttgaaaaagctagagagagaaaaccgaacaaaataacaaacgagacacatcacttcctagtacaactgtacacactaatgactacactgtgttctctctaactacaaagtttattgcattcattcaacctccgccaccaccgtctttttttttttctcttctcagtttattttctctgtataactcagacatgagaatctaaccatagtattcatttcatagtcgaggtatttgtctaccaaactttgaacaaaaccacttttttctcatttgggtattcccaaagtttctcattttttttttaagatctaaccaaactcactttctgggcatagaaatacatggacgtgttctttctttctatcgggtttcgaaaaatacgattttgatgccaacccatgtaccctttacagaccccgataagtattcttcattgcccattttgtggctccctaatttgaacattgggttatgctctgccttggttataggggatattgataataataagatagcgagtgagatcaaattcaaaggatctgaaaagttaggatccgaggccatttctttggagggtagtaagtagtagtagttgtagcagccataatacatagccatttttctctttcacttgaatataactttttgttaaggtggcttttgagagaggaatatatgcttgttacggtttccgttttgaaacacaacagtgttctgtcatgtgtgtatctgtgaggtgagcgtgtaaaaggtgaatgaaagagaatggagaagggtttctttcttttctttctctttctttcttttccctttttgtttatttgtttttaattttgtttttttatccttttttcataaattttttacaggaaaagatttcatattataaagggggagcgttggctttagcatgcaacttgggtgggagggagcgtcgaagaaagagagccacaacaatagaataaacactcacacggagacaagacaagaacaagatcgtgcaacaagatatgaagaagcagcagcagcaggagaaacataagaagcaaatggtcaatgaagaatctaagaagaaggagcgtcacattgtgacgtggactcaagaggtccttcttctctcactataaaattattttccttctgttttttggtaaataaattcatttttaaatttctccttctttggagtctaatgagtgttatgtgagttgcaggaagatgacatactgagggagcagattggtgtacatggaactgaaaagtaatcaatcacactcatattcatagccctttggttattcttcctgagttactcaatagtcactattgcttttttttttttttttaattttcatttgatgagtgacactaaggggttttaattaccatgactatatgcagttgggcaattattgcttctaaattcaaggacaaaacaacaagacagtgcagaagaaggtgaagtttttgagttaatgaatgagtgtgtgtttgaattttttatgatgattcattcaagatgtttactttggtcctctgatttaatgctttagctcatgaagacttttcatggctcttgctttatttttgtccttaatctgatgattaagtaaatgatgctttgccagatggtacacttatttgaattccgatttcaagaaaggaggatggtcaccagaggaagacatgcttttatgtgaggtaaattgacgatccttgtgttccatagctacacttttgtattacagcagttgccattcaagtttaagaacttggaaaaattttgcacttcatcttttgctgtctacttttcggtctttccattctgtatggtagacctcaatccattgatgtacaaggattgtatcattgtaagggctattaccaaggcaattggaaaattcatttattttgcctcaaaaccaagagtagattacaaccaaaagtaaccaaaccaagattttctgcttgtatagttctgtagatgataacaattgtgttgcacttgaaattgtattatttatgacaccttatgatctgcgaactaatttcttactattattattatctccgtaggctcaaaaaatatttggtaacaggtggacagaaatagcaaaggtggtttcaggcaggtaatcagaatttcattcttttcttcatcgaaatacaaaatagaatcttttatacaacagtcattcttattgcaatgcttccattgctttgtatgcagaacggataacgctgtgaaaaaccgtttctccacattgtgcaaaaagagagcaaaatatgaagccttagtaaaagagaacagcacttcatacatcaattcaaataacaaaaggatttttctccagcacgggtgtgatacagatgtagcatcagaaactgcaattaagaagatgaggtatggtgttctaagagatcaaaatatacaaattctattaagaagaatgttgacatgtcgtcctattgcaatataggaggtcacatatccctgatgccgcagagaagatcaactttggagacagatcacataaacaaaatgggattccattaaatgagcaatcaagagccccatttgcggttttagctcaaaacactcacaatgtcaacttgccagaccagcatcatgtctgcaatttgaaatttagtgattatggtaatgcctttagattgaattttttttttctttggaacttaattcttgcagttgtgaaactcaaaataagagaacaaactcaaaataagagaacaggacaacattaagggtgtgtttggtatgcggaagtgttttctgcttttattattaattacaataatgtcacatcattttcacctcgtttcccatgttgcccatatcctattcaaatatttgaaaacagaaaacaagtgaaaacaatgtgacacttttgcaatcattaatgaaaacataaaacaaacatactgtttggtttgttttctattttcatttacattttcagttaatattttttcactaatagtaaaaatatcacattattgtgtttcctgttttcaagtttttgtgaaggaattggtgaaactgaaatcaacataaggaaaagaggaaactaaatgaaaacaaggtgacattttaaaattataagtgaaaacatataaactgaaaatgaaaatagaaaattagtaaaacacctctaaatatattatgccataaatagcattgtctattctatcactctaatgtgactcttggtttatcatgcttttgcagctgaaaataacaagattcaaggaacattccttaaaaaggatgacccaaagataaacgcattgatgcaacaagcagagttattaagttcactagctctaaaagtagatgcagagaatatggaccaaagtcttgaaaatgcatggaaggtgaggcttgatagtctcagaacttacttttgtttcgatttttgaacatcttatgggcttctttagaaatgagctccaattgatgtcatcaaaagaaaagaccgaattatagattatgaagaagttcaacatgaacagaactaaatcaatttttaacatgccaagcctatctacatgaaactcatggaagtcatttaacatcttaatatatttgatgctggctttgaaaaacctaaaacagattcactggtccgctggatagtatacatttattattggagagattacattgattctgctaatgcttgtatgtatttctgtactagctgattttacaatgcttagttcttcagcaccctggtcatttattatatgctaatcacaaagaatcagacattatatgatactacaattgctacactaaaacaacatttccgcctgtgttcgaagcatttataaatgtcaaagatttcctaggattgatttgtgtatctccaatatgttccttaacacaagagtcacttgaagtgtgaatagtgcacaagcccacattaccttctactaaatttaattttgcacacgatgaggtggcatggattgaacacttgaccacttagtcctaaatgttagtaatggctttaaaaaatatgataatttcgcagatcagcttgttagcatataatcaaatataaaaaggctcaacttgtttatgataagcccatcaccagctgatatcaccaaggcttagttcttcagcttataaataagagaaaggtcattgttaaaaagatatgttctaacgcttgtgtgtatttatgccaggttcttcaagaatttctgaaccgaaccaaagagtcagacattcctagatataagattccagatttacaacttgtagatctaaaagagttattggcggacttaaagagcagtagtgaggaaatccagccatgctggaggtactttattttcattaaaaatatgacttcatgagagctatcgaatatctaacagtttctgcatctatcgtaggcaaatggaactatatgaagactctccaggcagttcggaatacagtacaggatcaactctcctgcctcattcagctggtgaggatttggaacactcactgcatcaggatattggaaccgaactgaatatacaaattgaagattcagaaggagttaggggatgtgaccaaggggttctttctagtgcaactctggatcaaggttagataattaagtcccatgataacaaaaagtaaaaatgaagataaattttggtaaaaatatttccagtttaggaacaactaaccactctgctgattaatgtgtagccacttatttatctaatttaaatggttagttattcctaaactggaaatgttttttaccaaggagttaatattttataatttcctcaaaatagaattgtttttatatgctaacattttaatgaatcagaatcactaattagatatatctttctatcacagatttattcccatcttgtgaggaacagataaacaatgatgcaattgtttctgccttatcaagttcagcggagttcagttcacctcttcaagttacccctctgtttagatccttagctgctggaattcctagcccacaattttcagaaagtgtaagttagccaagcactttgagatcaaataaatatggccaaccacaaaattacagtctgattatacatttatacttgtaataatgataaataggggagatactgaaccatgtagcatacaagttgtaccctcatcagttctagttgttcttaacttcttataagatcaacctctatcaaccctaggacttttggaatatcatttattgctagatacttcagtagtagtggtggggatctttcagcataactaatggtggagatagtaataggaagataaagaataaatcattaatgctcgagttacgtactgttactgattttaagattttatccttaaaatgttggggtaaacatcattagggcattggattagtggaactggaattcaattgatacagataaaaaaggagtaaaaaaagtttattctaggaagtgatgtcaaggggacaggtagttacataattggagataggttttaagatgggaaataacttgtttagcaataataagcacatataatgtgtcatgtaactgaaactgataggtaaagctttggtgttgcaaggataatttaagcttcttttctcaccatgattagttttagtatctttttcattcctaatagtttaagtatctaggctttgtaaaagctaatatgcgggttacttgtagttgtgacactcatgcaatacattatgtaggttttttaaagtttctcatttagactttgtaacttaaaaactttcgtttgaggaaggttcattatatttcataagacaggattcaaaacaaatatattttactataagaagctagtgtcacattttcttctataattaggacatactttgacataatatgttattcaatatatatttaaaataaaataataaaatatacagctaggtctttagtcctgcatctagtcccaactcaataagacaataactacaacaaaaagggggaagctgtatttgttttcgtgaaaagatattgcaggcataatgtttatcactttaacccacaaaaatagtttcatctctaaatttaaatacactttatatttatttgttttcctttgtaagaaatatactgataaaatgttgacaaaacaaaaacatataggttaagcatataaatattgtatctttgtgctgaaaactattgaagcaagaaacctcttacccaacaagaaataattatgtgacaagatttatagtgtaagatgttagttgttatcaccatcttcatttatcatctaatgtatcaatagaacacaaagcatacatctaccattcttgcagcatcaaccatattttcttctttctttggcattcttttatatgttttccttttctttttcaggaaaggagcttccttatgaaaacactcggaatggagtctccgtcgctcaatccaagtgtcaacccctcacaaccgccactctgcaaaagagccctcctaatctgaatctctaattcatctgaaatacaagacatttacaagccctttcccatttctgaaccctttctccccacccatggcaatctagcctgttagttcttttctgcttggtttgagaaagattgcaattttgttcagcctaaaattttggaagccataccctcctccagaatgtaatggtacattctgaggatcatcaacacatctaacagtgtccttttctggccctcctcctcaaagggttacctttcttgatacctgcaccgaaaaaatagtgtgcttactgcttagtgtgtcattctttggtttgttttgatattattctgggtttgtttttctccaatccagcttttgatcttggtttgcctttttgtacagagtttgcagtgtgatactagtagtcctgagtgtatgtatacactggcaattcgccatcctactacatataatgaacagagacatagatagaagagagaaagaagaaaaaaaagagtaaaaagattaaccagtggcaaattggattcctctttgttgtttttgggtgtgcatatatcatagaataaacatttttttattcctttttggttctgatgtactgaaacatagttataattggagtggaaatgcattttggcttgggtgtgcagatactgtttctattttgtctaacctggatttaaacacaaccatatgtagttcaaacaaagcaaaagaaaagcaaggagctcacagcaggaaaaaagaaacaggcatgaacacactcagtctcaaagaacattatgaaagtaaagctttcaagaagagaaatgaaaaaaaaacgatgtaaataacatcactgagaactgttggtagcaaatggcaaacaattcattgcaagtttgaccctcatttcactactgcaaaagacagacctttcagcaacatgagctccatttcgtttccaaaaggcaaaaataaaaataaagaaagcaaaagttgtgtacttacaaacactacagagcatacctgggaccctggactgacagaggcatgcaaacatttctctcttccctttcagcacacttgttttgccatggagtgtgctttgcagaagaacaattctggggggaactagtttttatttaggatgattattagttcaagggtggtggtggaagacaggagaaagataataataataataataataatggcaatggctaaagagactggtaaaaagaaggagggaactccttacaaaataaagcatattttgactcattttgttagctgtttactttctcgagggaaggtaccctttgactcatttgacattccaatttccacttacttaacaacttgatctcaccaaaacatatcaatcagctggtcaaagcctcaactgatttttttttaagtgtaattgattttatgatgaatatgctattaatgcatacatttattctgtggaattccacagtgaaatagttgttagtgactaaaatagtaccgtttctctattctgattttaaaattagtacatgtgaagcactattctaaataatggacatataccccacctgttctaaagtgagttttcccgtggagatccaaccactcaattttattcagtaatttccttttcctttttctttgcctcttgtttatgctatatcaaaatttcttaaatggaatttgaaattgagatgaagttcaaatcacaaatactaacaatttacacgtatcccaaacaatctgctggttcaataaaatgtcaaaaaacatcttaacttagttcatttggtattaaaaaaagagaaaaatctcccataccattttgattataagcttattaaaagaaaaataagctaaacataaattttaactgaaaatttaagaaagcaaaataaactattgcaaacaatttagtaaagctacttttattgctcatcccactacttagaaaggtacttttgccgctcatacaatactgggataatcttctaaacaaaccagagacaatgagataatctgaaaatcatgtttacagagagtatagctttcccctagtgttatgctataaaactaaatctagctcttcagtagaatacaggcaactaaatattggcacaatgaatgagagaatgggatctaaacttctcagctttgttcttctcaaaaagtatctgttcaattaaaattacaaatattcttttgcataagcctaaatctggttcattgaaccttcaagattttagtaagggcaaattaactacgatagtattatcgttttgacttcaaaattgctgatgggcttcacatggcttttcttttcttctgcaatctctgcaacttctgccacttgaggtagatctggtaagacaatcctgagaacaccatggaaacacacccccattgctttgttgagaggggatttccactcaatagagaagataccacaatgcttacaaatttgcgggtggtagtgatggtagtgttagccaaagaaccaaaccggcttatagtcaagaagatgaaattttggcccacagcaccacagcagcagtagagaaaaatatcccatgctgcctctggatgatgttggcaaaagcgaactgcctcaaatccactggcatggggccatccaaacatgtaaatcatattatatatggttccccataaattcatgcccagcataatatcccaagcacttgtttttggatacctggtaaggcaaaccatagttcaaaataataaaattaatatcaatttatttaagatgttcttagctaaaagagtcatttgccactaagaaagtccaacagtattgagatctgagaagttcaaatatttgacatgtgaaagcaacaacaggcaatggagttttccctacaagcaacattgcatgggtaagggaaaatgaaaaatcatatttagttttttctacttgactattaaattaaccactagagacaatcctaaggaggaccaatattttcagttagtaagctaattatgtaagccttagatggtattatggtaagccaatctattttggttcattttttcagctaccagtattgaacttatctctaaaaattgtgtttaattgaaataattaataataaccacttttcatacttcatagatggattaaaaaaaaacaccttaactaaagagacaaacaattccaagaactgtctattaagaaattgttcttatttggtattctttattgagattgtttttatctgtcgagctaaacataaaacattggagaagggacttggttcaaaaaaaaagaaaaaaaggagagaacacaggaaggagtataagggagggtgaagaagtaaagaggaaatcaaggaattgcatgtgcaaatttggtagtttgcatgacatcagacagacaggaatttctgtatgccagaacaaaagagagaggagcttctctattattaccttgcttttaaagaatcctgggttgcattggtaaatccatcaaaagcaaggttcaggaaacacaacccatatccaaggggagcatttggatgtgccagcttgctgatagtcttagagctagtctgtaatcaggcataaacaaataaagctaagctgcaattcatagactatgaaaatccctatataagaaggaagagctctgttattctgagaacttcctaacctttagaagtgcaaatgttgatacccctccagcaacaaggaaagtacaaaggtattctggaaaagtgtatcttataccatataccagagtacccatcagcataactgcattaaggtaaagtgaatcttttgttagaccaagagtaccttatacataatctgaggacaaatttaaattataaaaatcaacaaaaaaaatgattgagatttttcaatcatcattttcttttaaatgctttatatatcagatcctgccagaagttcctctatttagcatgctcaaaagatggtaaaaattaaaaaataacgaatgaaattatttctacctatccatatgcaaaaaggaaagaaagggtacataacaaataaaagttgaagatagaaatcaagatggattgtcaggtcaaaagcacaagtgcaggagctaaaaatgtcccagaatacataaccatagtatccatggtattggtaaaacattaaatattcacttccattgaccttatacagactatccctattacctagtcccacttaaacaaaagggtacgaaaaacacttaagaacaggatataacaatataattcaatcataaattcaggacataaaaaaaaacttcgtaccccattgcccagaggctcttcgctatgcgaaggtatgggggagggatgttgtacgcagccttacccttgcatatgcaaagaggctgtttccggattcgaacccatgaccaacaagtcaccaaggcacaactttaccgctgcaccagggctcgccctcaaaagaaataaaaaaaacagctaattttccgttgattttaattaaaatgcaagcttttcttgtgcatcaagcacaatgtactgacctggaatcattttggaggactttgccagcacctgcaagtagcaaaattaacaccacccattaaaaagtttatagcctaatgctaaagacactgaatgactgaacaatgagtccacacaaatgctgcagcatgcagcataaatatcaaaagctgtttcacttagatgcatgatatggctagcttgtgtttgttaacgtccttttttattttaatccttggatttctgtacataataatccccccccccccccccacccaagtccatgtcaagtctcaccactggcatttctccaaattaaacaacacacttcaggtaaaatcacaacttccataccagattataaactttttttttaaaaaaaaaggagacagaaaaagagtgttgaagaaatgatacctgagcagggtaactaatatacttcaaagcttcaattcccatagcaggaccaatggtgttggtaattccagcgctccaataactccaccaaggagcaccaccagaatttccactagcccacatctttatcactgtccacataaacaataccaaaataaacaaaagtaaacaaaataaaatgctaaatggatctaatttaaaatcaccagtgtaaagacttttatattgtttttttatcaacaaatgttaatggttagtttattagttttttgtcatcaagataaatcgaacatgcgaccttttcctcctttccttctttcttaaccaactaaccaaccaaccttatatctccagactttttatattatcgttcaatcataatttgtcatataagataagattattgacttttgtaagcaactgctttctgattagtttcagagacacactatatgggaattaaaccaagcctataaaaaaaactgtaattgctatagagatagagtaattagcgatagaatcttactgataaacgaccagattaaacacacaacattctgcgccaagttcagaaacgcaaggtgctcgaacctttcaccgttgaatcgcttcgtcgacctgaaaccaaaaaaaaaaaaaaacgaaaatcatagcaattagtagcggcatttcgaaattcaccgcgagctcgagagtttcggagcggatagggattcttacacattttcctgaagaacgccttggtagatgtacgcggaccagattccggcgacgcagaaggcgagcacaaggatgcgacggagccctccgccatgagcctccatgaaaccaccgagatccgccggttcggtttttttaatttaatttattgaaccggaaaatgggaggaaccgaaagttacgaaacggagatgggacaaagaagcaacgtgggaaaggaaggatcaaataacaagtgttatgctacgtggatttgccacgtggcggccttttattggatctgacacgccatcgcgctccttattggactcgccagcgcctgccacgttttcactttttcatcggtcctacttgttataatgttgttgcccccaccttacggttttataaattaagattaagatttaaattatatattttacaactccatttttgttatattattattatttcgttagttttagaatttaattttttttccacctacttattccatgttgatagcaaaactatatcgttttgcgaaaactggtttctaaatgatggctttcacaaaaacataagcacttcattacacatttaagaggtcactaaaatgctaaaaaatagtttaagtaaatgttaataagtgactttagcatatcagttaagaaattaaaaagaaaaaaatttattaagagacacaaaattgtgctatacatgatttttttttatattttcttatgatctccataataaatatttttttcttaacgtaatgataaaataagcaggaaaaattaggtgataaaatatccaattaaaccataagttaagtagtatttgaatgataaatatctatttagctaaaattaaaattctggtttttcttattatttttgtaattttagttccaatatttttttaaaaattattttttgttcaattcttaattttcacatgtttttttttttgttttttttcttcatttttttgtcactatacaaaaaaaaatgatagtggtatacaacatttatctattttattgataaccaatttttattttaaaaactgcctacccacatttatttaatctctttttccatcgacaattatttttatacaatgagtcaaaaccaaaaaaatgttgcttacaaggactcaatccagtttcacttagagtaataacatgttaatatattttttatattttaattaattaaattatttttcaatgatactttaaataaatatattaaacatagagttcaattgaatcaaaataaaatgaatcataaaaaaaaatatttaaaaccccattaactcaaatatatgtggaagaaccccatacatgaatacgtgataaccctcctcaattcaagctggtaaacatttgtcaagctcaaagtcgccatcgtctttagctcatgtttgctccacttttcaatttctttaattcacaaattcaacaaaaacttatgttgtgtttctggaaacatgtacatagatacatagcgaaatcaataggtgtgtaaaaaaattttgcacaaggaaaacttgcttctattttttttttttttctcaattacatagtggtaaaagattttctgtattacgggtagacataaacaatgagtactagtttccattatgaggggcctttttgtcaatataaatatacaacttttggggtttaaataaccatgaggaggtgcaaatagcaaagaccttcaaacccacatgtgatcttacatggcccgaatcccagtttaacaacaactggaccccctagtttggactgaacggcccaaaacatcatgcagcgccagcttgaatgtttgcaagactttgcataatcatcaagaatcaaacactttggaatcaacaaatcatgcatgagccgatataatcaaatgaaaaacaatgaaaaaagagagtaaaaaacaccgacttagaagcatcatgcagcttgagtcttagaaaactaagtaatttacgactttgcataataatcaaagattaaaaaaaaaattagaatccacatcatgcatgtgcccaaataaccgaatgaaaaaaaaattgaacaggcttttagaaactaacgcagcatcttgacaaacccaatcacgtgtattcaccaatattccaagtatatacaatatttaaaagtcgtctctctttcctcgttagtttttctcatcttcttgtcaatttccaatctcgattagtatctatagatatattaacaaatagttcaatttcatctttgtatgataaaattaccatcctaaatgtgttgcctaaccgaaatctctgtctctatgctgcgtttattttaatctctcatttatgtatagtttgaaaccttgcaagttgcaagagttatatatagctagcttgattaaactaagtacagtatataccttccgtggtctaattaacattctttcttacgtaacattacaattatttcaccccatcaaatgaattttttgccacaccacaatctaattaatccatatatatatatatatattaaaaataatcaaagtctcacggttaaaaataatatcacattaaaatatataaataaggggcaaccctcaccccttaaactaatttttaggattgagttagacctctcatattatacactctaagatgatatcggaatcagattctggtgtacgcaacaaaacttttatgacgagctcacctgaagatctagcttaattacaagccaaattcacacaattaaaacgtcatggtcacaagtggactgccaatgatttagggtgtctatataaaataacctgcaaagaagtatgaaccattacaagctatacatttatattgatgaactagctacgaatattaattcttgtagttccttgtctcgatcgtgctttaattatcgaataattctttataactaaatatttacttcgttgtaacgtggcaacacgtctgtgtgtacgtgccaagaaaccatgaacctggtctataaatacctcacatgaagactttttttataaaaataaaaataaaaaaataggcaagttagatcctggtgatttatcaaaactaagatacacatataaattatttttcaattaaagcttcagattcactccagaattcaaatttttatctttatctcatgagtttgatttttacaaactagttaaacttttgttagctcaaatgcatgtgtttgtaaaaatcaccattgtaaaaatcgccaaagcctgtcaactggacgacgcaatgcaagaacaacttcatcattgctttggcgttttttctttgaaatgtgcattttttttttccattcagtgtgagtagttcttcgttcattttattataatggttgtgtaaaaaataattatcccatcaaaataatttctattttaattttttaataatatttttttacttatattttttataatattaatgatggattacaaaaatctataaatatattaatgataatataagattaattttatgaaattattactctttctattctcttttataagcaaaacatatttcaattttttttttctaaatataagcaaaacttcttttttatttaataatattattattttgtttatggaaaacaataaggaggataagaagtatgagtttccaattcacacagccacatgtaaaccttaacattgactagtgaccaccatccacgcgacgtgtgttacggcgaggggtgttgtcagctgtcagtaaccattgccttaagtcaaccctgccacacggaacagcccttacaatttaacttctaaaaattacatctatgttattttcatctctaaaaatgtagtacatgcattatttaatgttaaaaaatgttaacttactaataaaatttactatatataattagatttagtctttaagagactaaactaacatatgttgttcaacattcggatatataccaaattataatatatatattaaatcacatgacaactattatatatggtgttgttattattacaatagtacgtaaggcatcttgttatacattattatatacgagaaaaggaatgagaaaaatgatcaaaatcatcgtaagaatgtatatatgttttggtaaattttgcaattagtattatgtgaatcatcgtaagaatgtatatatgtgaatcaaaagcatggtagtaagaattttttttactttttctttacataaaaaaaagaagcaaactcatttgatattaatgcaatggtcttgtttattcgtggatgtcataacttacaatagaattttagttcagttatgtcattaaaaaacattaatacataattgattgctttcatgctatgcaaatttctactataaaaataaattttgagaggcttatattttaattaaatttaaatatatttttagttcctataatttaatatttttttcgtctttataaaattattattttttatttttagtccttaagcctttagtcattttagataatattttttccatttttcaaagtattatctaattatctaaagtgttttaaagactaaaattaaaataaatataatttataataaaaaacaaaaaaaaatttataaaaattaaaaatatatttaaaccttttaattacttttaactactacgtagtcaacataagacttaattaccaataactatttccttcctattttagaaatataaagttggatccatgggcatacagtcaatggtttccagtttttttttttttttttgaaaggggtttccagttaagatgtttaaattgtgtcggatgatttccggagagtgtggaggctgctaaaccaaagtatacttataatttggttttgaaacttattcttaaaaaaatatctatagattcgtatccatgcatttcagtagaataataaatgtatctataaataggataatgatcttacatgtgattaaaaattagtgagtacctgtaattaagaatataatcataagatgtctctctatacataacagcaataaaatttaaatttatatactaatttcacataatttactaaaataattctatatatatatatatatatatatatataactacgtaatatattttatttgtttttatataagaatatattaataaattaaatttaaaacgtacttttatataaaaaaagtataacttgttaagacatttatttttaaaaaattattaaagtatattgttataaacacatccgtacatacaaaccgtatcaaatttaaaaggctactttaaagtcataaggactcactcttaatcaagcttataaaaccactcataatttcacgttatgtccgttcttgatagttgccactaaattaattatcgttttgttccagctcattatatataataatccatgtccaactgagcatgcatcttaatatatacagacaaatttcataatactttaaatttttccatatttatgctcttatatatatttttacagagtaaatgatttttattttatttctagcttagccaagacaacgtttgaaacgatgggaaaatgtgcttcacgagacaacctcatttttgtttagagtgataaaaatataaaagtgaaagagtcaaagaaaattaatgtacatgtgtttgtaaagttgtataattaaaattataattttttaaatatttttataaagttatataatgaattttaaggatttaattgatttttatcattgatattaatatcataataatatttttgattttttaattaatcatataaatttatttaaattttctaaaattttaatttgtagtaaatataagcttaattatattggtatcagataaataaagatattaatattgaaaaatcaaataaaaattcatttagatactgataaatgatatatatatatatatatatatatatatatatatatatatatatatatatatatatatatatatatatatatatatatatatatatatatatatatatatattttgcaaaatacaaatgctaagattatattatcatgcctagaatgtatcaaaaaaatattattatacctaaacctttttcattagaattgatcaaaatataaatgattatttccttttcacacgtttatcaatcactgtacgggtgtgttttcagccttagaagtgggactggaccacccttacccagaggcaaggggcaagaactataaacaagtcaaccttaaagctcatatgtccaaaataaaatatatatatataaatcgcaaagctattagtctacgacgaagtcaaatgaacaatagtaattaaagcaaattacattttaaattatttgtttgtttatcttcatgttaattggtaattgtggctattaggccattagtcaataatataactctgattagtgttaatgattaattaaatatagatcgactatacacatctttgttttttattatacttttgtgaagatttattgcaaaaaatggaattgcaaagagaaaagttacggtgtgtgagatttttcttggttgattagtggcagttaatgtgtaaggtatggtggttttaaacccccctttttttacatcaaaatagtagaaaactaaatctatatttaaaataacacatttcatttaatcatacttttggtttctatagtttaaattatgtgattttagtttcttaattttttttaataaatcaagttttatactttaaacctaaacaaatttacttttcatattatctaaaacataaatagtttttaatttttaatttttaaaaaattaattctattagtatctaaagcgaacatacattatgattcttaatgcttttatcatgatttaatgaggaaattactaagtaggagagtgcatggccatgtctagaaatattaggatttaagacaaattataaaaagacttaaatgaaatattaattattaatttttatattaatctattagttttttgagctacaaaaataatttagccttattttatagtcaactaattataatattttactcttaatatataaaataaataatttatttaatataaattataaatataaaatataaaataaacaagacaaaatgatgaaccgatataacctaaaaatagaaacaattacttgttaatactttctctattgcaataatttaatataagtcaataaagtcatatgttatccactttaacaaccgatttcaaatcttaataaaataatagaaataagaggaaaaaagagaaaaaaaaagttaaaaataaaatagtgaagataatttaaagtgatttttttatatatacatgcataggttaggtgacattgaaaatttaatgaatataatctaatttatgacggtcaatttatttaactaatgtctgtggccatgtttttctcaattatatatatatatatatatatatataggtcttactgtaaatacgtacggtactggaagagtaaatgacccattgccctgatggtcccatgcctctcatttcagtgtgtgtgaagtctgtgattcctctcatccatcattttcaaggattaggcgaccaaaatcaatcaattattgttaactttatgcttacgaattgaattacgtaattgcatttactttatcaattatcatacaagaaatattttttataacgaaattataagattttcttaacattaaattccattttgtaattgtcaccataaaaattccttttttataataatcgatttataagtgacttcactctccttaaatagttatatttttaacatacaatgtcaagcaccaacaggatggcgtgttggctgcggtgaatccttaatactttacaattttgatctaataatttcccctatcataccttttttttttttactggaatttacttttctcatataaaaattaaaaaaaaccacgttgtattggaaaaactgaaaattaatagtttcaaagaaattaaattatgacacaattcttcaaaaaatagataatgccattcttttatgatttgatagttcagttcttaaatactaccttataattactaccttagaataaatataacaattaattaatttatttatacttaaaagacggtagcatatatcaatacctccatataataaaatttgacaagttcacatcacttgtattttaaaaatactaccgcatacctatatatggaatatgatatagggaattagggatgctatttatttaacacagggacacatctaatttctttaggtgcatgtgtgttgtgctttatagagtaagatttatgttattttcacttatattatagttttaacctatgtcattttatatgaatttagataaatattccaacagaagatggtggaccctgtctgagtgtgaactggatttgttgattgcaagctcgtcgacggcttcaaagggcacaaactttcttagcttttagatatatattttaatttaatcaacagattatatatatatttttttaaagaaaataataggggatcgagatggatgcctattcttacagtctcatctctcatgtcattatttgtttctatggggccgtgttgacgttcttgcttgcttcgtgttgacgttaaagtgaccacttctctcattaattaatttccatcttaaaactggtttcacaaaaaataagaagaaaaataaaataattttttttgaaattaaaattagcttatttataaaatattttatataaatctttcttattagcttctccaaatttatttttttatacattacttaattttaacttatagaattttctcattttttttttataaatacttataaaaaagtttatcctaccaaatccagataagttgatcaggcgattaaatccattttatgtttcgtttgctgtagaatcacacaaaaactcactgacacatttctctaacgtagcaacatcatgtttccaactacgcgtaagtaaaattaaaattaaagtcaaacgtgatgtatacaacaaaattctatcttttttgttactttaagtcaaatttggttcatatgtgcaaaatgtatttattatgaatatttaagatcaatctaattataatttagcaaaaaggcaccactaaaagtaatacgttggagtcgagtatcattattatctctatctgaatattcgagtaattatgtatctaaaacgtgaagttaagaatattggttaaattaaaataacttttattaattcatccatacgttagtgataagaatgatcattatacataaatgatcttattaacatatatctttagggcaccagctaaaaattaagaaaatatttattatgaaaattataaaagaaaaaaaatagattaaattaggagtttgattttttttacttttaattataatatttgatctcctaatattataaatggatgattttgatttatttaatagattattaacaaataatcttaattaatagaattattaagttaattataaaataattaattattaaaactatgataaaaattattaacacgttgggattaataatcttttgttattttttttaatgattaatagtttttttaattaataattattttaataaatctattaatcacaattattagttaataatttattaaaggggccaaaataattaatttataaaattaagagaattaaatattacaattaaaattttaagaaatcaaaattataaatttaaaaataagaggatcataattacaatttaataaaaaataataataaataacataagtttatacattctaataaaaacatatatttctttaatttcttaaccataatcattgtcatatgtagttaattctctaacaaatttattagcagtgttgtgtttatttaacacaattagtcaaatactttcacaatttattgctgcgaccgctgcatatgtttgctatcagaaaatactagaagtaaatttttccaaattgacaacaatacaacataaaagtcaaccagtttgtcaatcatcacataattgtttacgttaaaaaagaaaagaaaaaaaaaaggaaaacgtcaagaagtagggcattctaggaaagtcggaaaagataaaccaaatttgacgacgagctcgtgtttactcttaccaggtacaatggtgttcaattaccactggatcaagtagctgatattatttaagtttaatgaaaaattttgaatttgaatctttaatatttatttgtgttaaattgttagagaaaaaattttaaaacttgataatcggtttggacgatattatcttccgtgcagaatatctatgatctagaaagaaaaaaaaaagaagtaaagttcgtttcacacgtggccacgtatgacgcggttcttatgtcagtgtgtgggtgccttcaaagcatagagaggcgaatccaaacacaaagtgttattcttttcatctctctgttgtgttgtgttccccaccccgcattaattcctcaccgtcttctttctttcttctcatcacaaagacacaaactttcttcctcaaccacccaacccaactttttattccactcatcacttccttggaaattgcaaccataaaaaaaattgtttgtttttattccttcattcataataatactttgaaaagtgttgctttttgggttgagaattgagagttgtggcagggtctaatgggtaactgcctagattcttctgccaaagttgatgcagctcagagctccagatccacttctggttggtcttagatcattaccctcgttctgatttttcttctttttgtatttttttaaggcttgtgattgttatcggaactgggtttcatagttatgtgttgatgatgttgcaaggatgtaaattttttaatctcttgatcacatgggttggataaaatttgacatttttctcaaactagtataatatatggaatttttgtgtgtggagggggtgttatgtctttttttttttttgttaattttagtgtttgtacatttcagcttgaaatattactatcagggtttggattattcgaaatatcatccttttctacttttatgattatgggttttttatttttccttcttcaatttttacgtggatttaaacgttaccgtatagtctgactttagacatgtattgttttgagaattgaagtttggttggtttttataagttgtctgggaatcgtgtgaaataagaagttgagtacgttcccatatttatatctgaagttttataactttatgctttttttttttatgttgaaaataagcgttacatcagaatggtgaagcaaacttttaatttaattataagcaatttaaattttaaatggaggagtttggagttcataaagtaattaaagtggaagatttggttttgtttttctgtgattatgtgaattgcgtgttgaaatcatgaaattgagttataactaaagaaatttgctgttgtgatgcacaaagtatgaattacttgttcagaaatgggttctactttctagtattgttgaatgttgatggttaaatttgaaacctgtttttttttggctacttgcttttgtttgtgtagtgacactatggattaaccttgtttcccttttcttttagcatcaggaatctcaaaaactactccttccagtttatctattccatcatacagtgaaaaaagcaatgcctcaagtcttcccacaccaaggtccgagggtgaaatcttgtcttctcccaatcttaagcccttcacattcaatgagctgaagaatgccaccagaaattttcgccccgatagtcttctcggtgaagggggatttggatatgtctacaagggatggattgatgaacacacatttacagcttcaaaacctggatcaggaatggttgttgctgtaaaaaggcttaaacctgaaggttttcaaggtcataaggagtggttggtaagtgtttgctttcccctgctccaaaagaaaaaaagtacatgtttttgtttttattctcataataatatatatggtaatgaaatcttaatctattttcagactgaggttaattacctcggacaactgtaccaccctaatctggttaaattaatcgggtactgcttggagggagagaaccggctattggtgtatgagtttatgcctaaagggagcttagagaaccatctatttagaagtaagttaccataaccattatgccattcattcataatttggtcaccaaagaaactcagaagaaagaaagtaacaagagcagattaatgcttccttaagaatgatcctttttcttaaccaacatgtttcaaaattataaatcagtttgttgatggcctaaatgagagatatttgagtttcatttgttactgcgtttaagatttatgtgttcattttatttgacaggaggaccgcaaccactctcttggtcggtgaggatgaaagtggctattggtgctgccagaggactctcctttcttcataatgccaaatcacaagtcatataccgtgattttaaagcttctaacatcctgctggatgctgtaagaacaatgagaatataaacagtgttataagttctttgtttttctttctgagtgaactgcttacttatcttgtaagggggattgcaggagtttaattcgaaactctctgactttggtttagctaaggcgggtcctactggtgatagaactcatgtgtctactcaagtcatgggtactcaaggatatgcagcacctgaatatgttgcaactggtatgctttagcttcacctaaatcatgagtctggtttaatttctgctaaacataataattatgagttttaatcctcgttttcgtttcaaactaggcattttgtacctcaactttttaggttcatcttgtttttttatgttgtactatttcataggatgaggaatgctaataacacacttttaccctcgtttaaatgctctcacattattgagcaaaatctcatgataacctcactagataactttgggtcctgtatgggatttcacccaataattgtgttgttagcatctctcttcgtaggataaatgagaagaaggactcatttcatcgttaaaacattacactaaatccctacttgatttacaggtcggttgacggccaaaagtgatgtctacagcttcggagttgtgttgcttgaacttctatcaggaagacgcgcagttgataaaaccataaccggaatggagcagaatctggtggactgggcaaaaccatatttgagcgataaacgaagactgttcaggattatggataccaagttggagggccagtacccacaaaagggggccttcacggctgccacacttgctctacaatgcctaaacagtgaggccaaggcaaggcctccaatgacagaggttttagcaactctggaacagatagaggcccccaagacagcaggcagaaactcccattcagaacaccatagacttcagactcctgtgagaaagtctcctgcgcgaaaccggtcaccgttaaatctaactcctactgcgtctcctctcccagctcaccggcaatcgcctcgtgtgcactaaagctgtgaacatagaacatctgtatatgtaaattccttaaatttatcaggttgtgttttggacagcatgcgttgaggcatgtgtacttaaatgcaattttgggtcatgcacggtagagtagttaacaccatttatccaaatgctatgcaagttattgcagagcagtattctgcatatatatctcctgttaccaatgtcttgttgataataacaacctgacacattgcttcccttctattatgggtgtccctttatttggttttggcctaaaacaattccaaaacatggagagagagagagggttgttgtatatacttaacatcttgtgtgcaaaatttgttgaattagtttttaataccttcttataatttggatttggattttgagtttaatttaactttattattttgtttgagtgagaattatctctcgtttatatatattattttgagattaaaatatatatttttttatttttataaatatgaaaatgtttcaaaagtttgtttttataaaatttttagtatattttttatctttataagattaaaatgtattatttctttgtccggatgtagattttatgataatgatttttcatatcaattatataaataatcaatgtaaatgtgacattttttatattgattatgtatataattaatgtaaaaaagtcaaacagataagataagtttaaatgtttgaatttatttcaaacaaaaaaaataacacattttaattttgtggagaaaaaaaatatgctgaaaatttttaaaaaaatttcaaatattttcatatgagaaagaaaaacatattagttcatactactataagattttcaaaaaagactttaaacatgtcaatatattatctcgtctttgatctagaatgctggatttgagttatgaagaaacttgtgatgcgagagttgttactgtcaccatgcaaatcccgaattatgctctaaattggcttacatcatgggaagcaacgagaccagatatatgataaaagatgtgacatgacataactagtaacatgtaaaatgcatgtactttatcagaaatctgagggtgtattgaatgagttaattcagtttactgtacatggagatagtttatagatacctcacgtgaagtaaaggctaaaaggaatagttgcttattcaattgagtgattatctgattagacttacaacagcttctagctaaatggacaactaactaaactgaattaattaatcattacacacatatgtgtgtggcgcggattggatggatgagggtgtaaggagtctcattctgagggcgcatcagtttgcatgaacttcacttgcatagttgcatttgatgtactcgtgtttcttttcataaagttttcattgttttacaagtcattttgaaaacaaaattactggtaacaattaagtctcttgattaagaaattaaaagtacaactttttatgaaaaaaatactaacaacgcaccttttcaatataattttactgtgattttaataaaaaaaattattattaattactagtagaagtactgattttcattgaagacagatcgaagtttggaattgattgcggcaacatttttgtcccttgaaaagtgatgatacatttaatgataataggagtttattttttattgattcggacatcatttttgtcacttgaaaagtgaagatacatttaataggagtttaacttttatgtattatgtgtgtaaattattacacaattaactaattaaacaatattatattataacttttaagataaataataaaaaaatttactgtaataaacttattgtacacatcggtttgtgtttgataatactgtacttaatagtgtatatatacattatttattcttgtaacaacatttctgttgaatttgtttaatttaaagtcaaaaaaattagtaatacatctttcaccacattgttttaaacatactatttgttgatcgaaattttgttaaaaatcattaaattttgtaggctttactattttttttaaaatcaatctcactcatggttttgtaagttttattagtaataaattttaaacaataataaaataggctaaaaagtaatttttagatagttctaaaaaaatttaaaatgattaactatgtttttagtctctaaattctttcaaaattcgatttttagttatgaacaaaaatttgatcagtcactatccctcaacattattttttaaggtttttagtcctttaataaaagtttgaccaatggaagttctaagttttttaaaaaattaacttttagtagttgaacaaaagtttgaatctattatttttaattatttaataagatttcaggactaaaattgattttttttaaaaaaatttagagattgtttttattgtttctcaaatgtagtaaaaaatgttttaaaaagatgtagaaaatcaactcggtcccctttttttatcaaacaagttttcattttgaaaatgcattttcaaattgaaaacttgtaaattaacaaccaccttaaacaacactttaggaatttcgatttgtcatacttttgtttgagaattaaaaattcttaaaggaaaaaaagttgaggatatatatcaatcaaacttttgtttaaagacaaaagacaattttttaaaaaaaattaaggattaaaaacttagttaacctaatttaaaaagctacaaccatttaatgatcaaggttaatttccatgctatgatcggcaaccggaattgaatgcatgctttaaaatgcaaaatccaacattatacataataaaacaaaatcacacttaggttgttgtacatcctgtttttttactctcattacataatgaaattatgattcccttgtatttttttttcaaaccaagatgcattatggaatcatgattctgctgcacaagaaggggtgtgaaaaccatgcacaatagaatcatgattctgttatccatgattttcgtccaccctgttgtgatgcggaaacacaattcaataatgtattttggggatgagtaattttgaaggatgagccaataataaatatcattaaggccaatagcaactccccacctaacaatcaaagtttaaggtgcttggcccaaacaaacaaaaatgaggtgatgtatactccatatctcagttttatttttctgggctagtaattttttggtccacttttatatttaacatgcatggaaattggggaattacttcttgcaccatgtttttctcttcctgctccacaatttcctatatttcccttcatttttatggaatgaatattttgaaagtgtaaagtattttagaataactatttggaagtatataggtaatatagtaattttgttgagcttttcttttttaatctataactgttagtaatgagaattatcctgcctatttgattcaatagataattttatccttaaattacttcttaaatttcaaaattttcttctaatttacattaacttccaaatacttttttatattattagttttttaattctatattttttaaattgtatttaactactatttttttatttaaaaaatttagagaggcacggatccatgcctctctccccctagtcaataataaaatccattaaatttttgagatattatatatttattatgcaagtttttattaattttgatattttcatttgttgaggcataagttaataaaatttttctttttaaaataaagttaatagaattgttaacatcactaatgtatgtaatatatataatatttaaaaataaataaaattcatcattattaattcaaccaatcattatgttttaagaaatatttaaggttgtgacaagttttatttccaaataaatatgacatattctaccattaataatattaaataatagaaaatattattttaattaagattaatatgctaaaaaaataacatattctattttatgatacaaataaatcataaaaatggggaattatatatttttaaagaaaaaaaaattattcctaatattgttcttgactaaatatacagtactcctaataatcttttacacttttaatttgaaatatattttgttccttattgtaagatatatggaccctcatcaattactatttttttacactcttaatgtattgtagaaaattaatgaaacatccatttttctgcaacgttatttcactcagaacctatggaaaggtgtttttaattggtcggggttagattttgttttgcccaatgatattaaacaactctacttgcaattaggattgtgtatgtccgggaggaatccaggaaggtaaaatatatgttttgacatgctacatgttagagcatatggcttctgccaaatgctgtcattttcagaggagagacagttaatttcacgggccttttggcgaatattaaagctctaccatggaaataggtacttttcaaaatgggagtgaagccaggggtattcttctcaaattggtgctgtaaccccagacaaaatgctttagttggtaatacatatatttgttgagaatgatatggatagtagaagggtttaagatgttattttttggagcttcgatcacaattgtatggaggagctgtttttttttggaatatgcatgatggggtatacctgtacaccttgtacagttctgtaagatatttccttatatatatatatatatatatatatatatatatatatatatatatatatatatatatatatatatatatatatatatatatatatatatatatatatatatatatatatatatatatatatatatatataatataatataatataacatattacttcttttcttttgccttaaaaaaaacatataccatatttatcggttaaaaaaatgatttcttgaattatgtgtaatgtatttaaatataataattacttacttaaactatttaattatataattatttttgaaattcaaaggattaatatagtgatataattaagatatgttgtgttacattaaagaaaaatatctatttaataagacaatttatgtttgattatttttatatataaattttcttgaccgataataatcacattttatgaataagattaatttctgatctaatattaattgaaatacatatcttgaaaaagaaatatttttagaataaaatttaaatttatttattaattaaaattaactaacctaattatttttttagtttttttatatataaaatatctggagtgtaactttcatttaagttttttttgccttatgatgagtacatattttgttttgctatatttttaaaagaaaatgcttacattgtgatttggccgtgcctgaatattatcatcatcaacattcataaatgacttccaaagtggtgttgtagcttacaaatcatctatccaaaatattattataaacaagactttagatttaatcaaaatccaataatccatagatctccatcttctgaaaagcataagaaaatatagtactgtcatagctatgatttgagcaaccggtaaccctgtgtctgataaaaaaatcactgatttgtcaaataccatataactaacaccgggaaaatgcttgaaaacaaacaaataattaaataaccatgcatacatccaaggccaaaattcaggaaaataattaaactaaactaaatatcattactgactaaccgctttcatggggtaaacaattttatgatgttcctcaccaaattttttttctaatttcgagtatcaccaggagttcccccaaacacttcagtatagactaactttggattatatttcaataaagccctttaatgaagtgttcagggaaactctagggaaaacctgaatagtatacatgccttgtcatctgcttcaagttaaatcttctttggtttcttggtatggaaacgtttgctatgttgttatatttatagtggtattctctggtcaccacaacgctgtttctgccaagaaatatcaacaagcataaaccatgcactgaacctagacagcgaccaagagggaataattttttcaaagcagtctcaattttccttttctttttttgtgttattatggttgaatcatttatcaatcaacaatttacatttctggaatctggcatcttgcatgcaaataatgtggtggtatcctacgtaagatgtcattgtgatgcacaagggcaagttgaagattgatatacgattcaactatataccacggttcgtcgccacctgaatttgataaaatatgaaccgtaaataaaatgctcttaatgttagtacatgtgcgtagagtgagcttaagataactaatgagcccgacaacatttgattctatcatgaaacgattggagtactagttcattcgaaagtggtcaagtgatggatcagcaaattaagaattagaaaagctaagataccatggccattagccatgcactttcaatgttatgctcttgccatctttcccacaattgtgaccagattcaacaatagcatggaatgaaaattttctagtaagaattgaactcgaatattaggagtttactataacttagacatacatgacttaacaattgagatagataccttagtaacaatagcatgtaataaagctcatacatgtatatttcaaaaaataattaaaatcaactttatttgggctctcattgtatattttagactattttatttttatttttattcttttaatacaatttattgctttgtcaaatggggcgttgtaagttttgctgaattgtggtctgaattgggctttcgggtgatcttgggaagctataatttcatatagggttactattggcaccgtctcattgctatttcaacccccaaacgagttggtattattacaatattactacaagaaaactcaatttagagaccaaaaactcaatcactaaattgagaaaattggtcactaaagcactcagagaccaaattagaatccactttcaacaagtagctaaatccttggtagctaattttggagactgttttaaagactgatcttgaaaccctctcagtatcgattttatatataaacttattcaatgatcgattatatataaaccgattcagtgatcattttgtaaggattactagtttgttactaaatcagtctctaagtagtgaatatctactgtgcagtatcctttatttctttatgtacccacctaattttttagatttaaaatctatggatattataataacataacaactgatatgctaaaatcagtaaacagctagggtcctatttctaaattttataatccttcaaacatgataatatcttgcataagcaagctcttgttatcatttactggcaccagtccttgtaccaatgggaggctgcaatatctgagagaaccactcgttggcttcaatgactgcaaacgaaggaatacttcatgaatcatgatcatttgaccttcaaagccaacccactgtagttgggttctgaaggatctgtatcaaaacaaagctcaagtcttaattttttttaaagtagtatagtcttttataaatacaaaatgttgacttggtatcaaaattgaatacaccagaagctacatgctaaaaactgacagtatggaactagagacaaattgagattggaccatagaacaataatacacaagtctaagatttttacacgatgttttagaatcttgaatttcatagtagctgatggtgaacttacagtgacatacggggcactataagtatccaatttggttcaattggcttgatttgactcttcatccacaccctttaaaagtagaataaaataatctataaagcagcaaaataaaagtcaaataagcataaactgatttttaacttgaaaaagaaaagaaataagaagctagagaaagacttcgagtaggtcatgcgtgaaacgttaagagaccaagcaaaccaatgaaatggaaccaactatatataatcaccaactgtttctaattatatatactgtacaagaacaaacataagtcagcaaaacttctattaattaagtttactgcattaaaaagcttaagacccacaagccgaccttagccatgaaggtttttggggctttttagccctttgggctttttaatgcgtgccttttggccctgcggcccacgctggccagggtctagctgggccaagtcgatccattttgatgactctaggaagcatgcatggcatcaagaaattaaaatctagattcaacactatatttgtgagactcattctttttcaacacacgtatggctactattattgaggaaaaatgaagtgaatgatgtacatgccactcataatgatcaagatgaagggatatacgggtgaacattcttactaactgtttttatttatttatgaatctatggtatgcaatacatcacgacaagacccaggcattccaacaactttagcactccaagaccaattgatcccctgacattgcagtattattaagaaaaagaaaaataaaaacaaactcatggtaggattagaccaagagccatgaaaaatcaacagaatttgaaatcagttaaaccaacacgatttctaaagaacatcccctaataaacttagataaagagtcccaccgaatgaaatcattcctatggacaatcccttaattagcaactttattcgcacattggtttctttctctgtaaatgagaagataaaaatgtcacatgagaacatagactaagacaaaaatttttaacgaccatgccactcgcaaggaacaatatgaatgtgtgaaatggtagcaatcaccaatcaggagtcgcactccaactaaaatttatgccaaccccgttatgttattttgatcttattatttaatttaatcatatttttcattaattatctttatcttcatatttataattcatttagtgtttatcttgctattgatcaaccttatttttctgaataaataagcacatggttgatccatgtagctctccttcttgtatctcccttccttcataatctacgtcaacgaggactagagaagttacacgattgagagataaacttgatttgtaaatatggtagcttcatgcatttaatcatattattattatacactaactcatcaattttgatttgtaggtataccaactttgatattgaaaattccactacctttaggagcaagatacttccatatgtgactagaaagtggaggtaattttagacatatccaaccagctaatacatatttgggaaattgagggaaaaatatccttgttccacgtataatattgacgaggagacaaggaacatattcggtgagagctaattggacctttcttggcaggttagttagggcttcttctttttatataaaaaattgacatttatattttattctattattttactagctataaaattaatggtgtgttatttattacaagatgaaagaaaaaaggcataagacatacataaaaagaatgctcccctcatagatgtcttgtgggagttatgatttgtttgagaaaaagatgatgaaagatatgctcaagagacgtcatgaatcaaaccaatataatcttgaaatatatattgatcctctatcatctcctacacatcattaaaagtgaaagtaggcctgcacaaaaccataggatgaactgacatttgaggcgtattatgaaatgacattggaactcgtaggtgatctaattgctcgctttctttatgtgacatcacttattctgaagcacacatagatgataatgtctcgttgtatatagactagcaagatgtttggaaataacacataatgtgatgatgaacatctaagttatacaattatggagatgtaacttgtaagtagattttatttctaggttcattagctaattgagaatcattgatttacagttaacatttatttctacattttaggcatttgaaccagttaagtttacatacggggaatccttatttatacgaatttcttgaccctcaattcattcaaaagttaggaaaaaaataaagtaaaagtccaaacttaccttcacaaatggatgcatgattaaaaacagaaaacaaatttaccaagcaccttatatttgtaagtacaacttaatatctgttttaaattatgtttgcattctaactttgccaatggtcccattgacaactccttttatttgtcctagggacaatgttgctatgtgattgtgctgattgcacaagaaacccaccacatacatgaaaaatctgagtacaacttacgctgacttaggatatgtttaaattttcagtagtgagatcgaaaagtatgtttgagagtaaaattaatttgaagtcatgtttggttatccctcaaaaatacctttgagagtaaagtttttcctagaaactccgttttagttaaataaaacttaaaatatttttgcaaactcattttacaaacttacatttaatctaaattttactttgcattttaatccaaacatacatttagttggatttgaaagatttgcttttgttcaaggactagagcgcggtgaaaatgccagcaagtgaacctggacgcaacataagacaataggaaatttaatagaatgagaatattatcaagacagcggatattgagtgggcacatgctatattctactgtatttatgctatgtcctttgttttaagcttttcagatgcacaaacacgtaagtgtaaattatattatggaatctcatgcatacatgaaaagtctgtgatgtttaaatttgaaatcacgaaataggtcttgcagatgtgacggggatgcaactaaaatgtttttggctataggtagaagatgattaagtagaggagtgccctatgcccttgactattttattattaacttccagtacattcaaattaagctttaaaagagaggtttcacttttacatttcaaatcatttgaatttaataaatcgaaaattatcctattccaaagtcacaaataatcattttttttcatcttaccatttaatttttattaactttttatatttggtttaggttattaagaacttgattagatcatttaaaatttaagcaaagatagcaatccatatgatctatattataaaaattaagttaacccttaattttcatcatatgttagacttttattttacaagataattaggaattccaaaaaatagtttctctcctcttctgaaatttttttcattcctaaacatgcatgcacgaaactttagatatatagagatgtagtgatgcattatcatgacttctttctttaaaaaaaagagagtaatatatcaaaaaaaacggaagaaagctgaatagaagcacaagggatgccgtggttcagcatacatagtctcttacatatatgttcccataaagagacaaataaaaagtgatgcagaccaaacatttcagcaccaacataaacaggcattatcatgactttagcctgtacttaagtgagatattataattatgccagagatgtatagggctgaattatcttaagattagcttacacgaatattgttcctaacttgtcgagaattcacgagtaagaaattttgcgcgcggtatctgtactataatatagagttaaaaaagataaacaaaaaattataatatgctttatgaaaaaaagaggtttgcataatattttagtctaaaggagatatttttgtaagtttgttgaaattccaaaggaactaagaaaatcaaagaacaaaaggtttaaggaatatcgaagggaaatgtaagcaacaatattcttttcagagtaaagtatgatctgattactcgaaatattttgaaatttagttttattctctatacaataccaggccagtttttaatctctgtgaataacttaaactacatcacttttggtaagtgtttataaggattaaaattgaattttaatacattctaaagaatccaaaacatattttattcttctttttagtacatgttttattcttaatattgaaatacgtagatacgagagactaaatgaattcagaaaaaaaaagactaaatgatgtaaacctttttctctttattaatttaacaggtcatatataaactttaattaataataagtgttaaaatataaattaaatactgtgttgccacttaatagcgcctttaaaccctcttcaactaaatgctagcgagattcatttatcatacatctctttctctttttctgtgatgtggtccagctataagagtctccagaggttactatttcaaatgaatgaacctgaattcttacagcttgttaaatatttgtgtgatatttttttcatgactcatcgtgaaaagcgcgcagatacaattttcgtgaaaggaacacttttcttcagcggccaaaatggacgttttggggataaagaggaaaaaaaggtcaaacttgtaccagcaaaacgttatttatatatattctcagaaagaaagaaaataagtctatttaacctggaatatatatctagtcttacaagagaagactgtaatttatgttaattgtattgtcttttgttaactgcaaattacttatatatatatatatatatatatatatatatatatatatatatatatatatatatactggaaaaaaataaatttaattagaacgaaaaagtctgagtacattttggggagttaatttttttacacaattatttaaatattgaagtctaatgaataaatatataataaatttaataaatatttattattaattttatgtgtaaaactaaaggttggatatattagtagaagaaaattgagcaaatatttgctttcaaaatgaccgcacaaattttcaactttatttgttcactcaacaaatatctctactatatatagagcacttgctgtgcattgtttaggcaaggaaaaaagccagtgaaacatgtctcaggggattattcatttgttggctgtctcttggagttcctctgaatgcttcatatattagggactagtctaagactcattagaaaaagttagtccttcaatgaagtgtttgggggaactcctggattcaaccaccattgcatatgaagaataaatgaaccatattcattaatttcatttccaacatggttgatttcattgacgtgttcagcaattccaggatctagggttatgctttatctttcttacatttcatgatagcttcttgcatagtagtgaagcacacatattataatatttgttatttcatggactgtgatctaccaaatatttctttttacattctgctgttttattgtctgtatatatactgctttcatcagaatttgcagtgtttgaattaaacaagattcttccatgacttgtatttgcaaaatcaacaaacagaactggaggagaaacttctcggattacatgccagcaacagctctcacaaccttcataaacacactccatttttcaaaggaaagtgcttagaactgggtaatttgttgtcaattggagttgcattctttgattataagattagctgcaatcaaattgcggttggggagaataaaaaaacctttatattacaagaaaatgcgattgatacacccgaaaatgcagtcatgatgcggttgcggcggtgattcaaaatacatttacgttgcagtcataattgtggttatggaccacaatttaaaatcatgtctgcaattgtcatttaactctggtgaccatgaaatcccctcatttcttgatatgtgtcacatgcgtgtaagcatcaatataaggttggtcctttattaattagctgctagctttctataaagattattgatataattgcgatgacaaaaatgacaagacagctgtttgagatgactactttctgtttaatttccttgtttcagttgaagagaaatatgtaacaatctgaatagttaattttaaagagatgcgagccctatatatactactagtattgtatttattttggattcggagtcaaagagtcatctttggaattaattcagagcggaggaagaatgcaagttttctagagcgacgcaggagtcaagaggctggaaaatttgaagggatatggtgtttttcttctcgtttttgtgttttcatgtgtaactagagagagatatttggattagggttaatcaaccttacctgaaaatctatgtagtttagtgattttttttgcttataatatttgattttatgcaacatgcgtttttttttttatgttttatagcttttagaaataattttggcttgcacaacaataagaatagaaagcatatatataggttaaatttggaatagtttatcataagtttaggtgtattaagaaataagtctctcagttcctaggaatctttgatcttataggttagccaaataagaaactagctaaaggattaggaatactagtttagaagaagaacacaaattctaactagctgagaatttaagcttaattctaaatcagtagatttgaagtatgcatacacaagaattatattttattatatttttatggatttctacatatagagtgatgataatgaaggggatttgtacctagttgtttctagacaattgcctttctattcctttgaaaccaattcggtagttattcttgagtctcaacaaccaccttcaccaatttggtagctattcttgagtctcagcgaccgaattttggtcgcaaatttagttgctagaatcttcaagaaacaattatttaaaacatctggcgacctagtactcggtcgccaaagctgtcactgatttgtctaaatgaatttaagacatccgtcgctaaattggtacttgtttgtaccagtatatttcggtcgctattttttgtcgctaatccacattattctagtagtgtctattcactaatttgtgcttcattactcaaataatccaaattggtaatcaaaattatacagaaattttatgtatattgacattaattgggtgtgcacaaccacattaccaacaaattttgtaccactgctacttttggaataattcatttaagagttcttagctgtcctgaattttacattgtcacatcgaattttaaaacttcaactttttatttcaataatgaattgaattaagaagttaaaatggatcctacatatattacgtactcaacttctttatatgcatttttatttttttttcaagataataatcttttaatatttaaatgataaattaatatgtgaatttttcaatttttttgacggaatgaatttttcaatttctaatattacattttagataataaatgtttaagtattttcatcaaccaaatttatataaattttatttattgattagctttttattattatttattttacaagacatataatatcattcctttatattaatgtaaggtttcacttaatttaatttcttataattttgtgttatatttattacttcatattctataatatagtataaaaatatatatttatttatcactaatttatccacattattattaaaccatgtacggttgaattaatgaaccgtgaaccaatactttcatcaatttaacaaaaaacgatttagttttaaaaatgttgatcaatacaacttattattgattaagtaaagtctgataacttttcatcttttgagaatatctcaaatcatagaattataattagggtaaaatatgtttttttttttcattgtttatcttgatttctgtttctagtcttttgtaaattattttactatttttactctttcataaattgttctgttttgttttttaatccctcacattattaatttcacatacaatttctttatgctggtcactctatcatttaacggttgaaattaatatcagaacggaaaacaaaacatagcaatttcatatacgctattttttatcagctaaagacaaattatattaactttggtaaagggtacaatatcccatatacaagtgtgtacactctctcccttcaatccaacttcgatttcactctccatgagaaccactccgtgtacattatctaatgcaactgaaggttccccaattatacttcaaagagaatagcttgactatacttggggattttgaaggaactttaggttattaattatatcattctattctattagctttacatgttatgtcctgcatggtgtgccctagctcactatccagaatgaattatgctctctgtgttgacctgtaaaattcgaccttgtacaaaagttgactgataaagatgcaagcaagtgaacctagacacaacattgggcaatagggggaattgaagtaggaagaaaatcaaacagtaagaacccaatatcgagtggccacatatttgattctaccatgttagtttctgctatatatattccctctgttttaaccttttcttttacacagagacatgcgttagatggaatctagaacgcgaaagagtgttaacttttctttgaaatcacaacacatgggtcttcgaatgcgatgctgatgcatatagctaagaattttggcttggcagaagccaagtagaaaactctcgtccttaacttttccttttctcgttttctgcaattctcaatttaagctttagagaaagaaaaagaaagaaagaaaaaagctcttctcactcatttccgtgatacttaccatgttaatgttttaaaatcagacgtcattgatgatactggttcaactgtgattaacctggaccaatcgatattaataaaataatattgtcattgattcttattataaaatccaaattaaaaatataatttaattctttttataaagttcaatttataatttttcatgaattatttatattttaaaaaaataatccctagaataatgtaaaagtgaagacacataactcattaatatttgttagttttaaaacatattgttaatttaagataaatttaatatttttgattaaattaattaaaattttcaatctaagtgaattagttatatgtaaattagttaattctgacattgtaattaataaggacggaagagagtactaatagttaaagggcaaaattcatatacagtacattaggtgctgtacgtttttttttcttctctggtcaaaatttaatttttatctcaataaactggataattctttaatgcaaatcctccttgctatgcggattatcgaggtagaattccaattctgatagaagagcaacacaaacagtaattattgtatttaacttttttcataattaaatcaaataatgcatgaaataatattaaagaaacattacaatactaaaaataatattaaatattactaaacataagttcttaatatatttaaagtacatacaaaagttaacatcaaatatattataatgctaagtcaaagtttcacattaaaatttattaaaatgacaagtttacatttagatttaaaaaatataaatattttaggttgattttcatttttttaagaaaaaagtttaaatgatgttatattaagtatttttcgttgactttctataaacaatatttttttttgccgattcttcagtttctttttttttttttacctttttttcttataaaattgttgaccaattttctgattcttttaccggtttttcttcaggtcagttttgtggtttatttgaaccagtgttgactagttcatcgattttcggaatacatatattgttttggaatacttatttatatataatattttaattattgaactcccttttgatatttttcataacaaatcaaatttttatctaattaaaaaaactaaaatttattacttaattgttgtaaatttatcatttatttgataaatttatattagttaaaaacttaaaatagtttataatatagattaaagtagcttcttttttttcaaaatttaatactgatacaggagactttggacattataattgtttttgtagcaattaattaagagggattatcttatttataaacttacggtgaaattaaataattgttaataatgtacaaacaaaaatgtatattaataagataatgaaaatagttttattaagaacaattatatgacatggtacaaaaattattaccatctcatattcacattgaattatcagatttcttaaaagagaaaaattcatgtacattataaactaattagaaagaacagctttaattttttttatactaatagttacattttttaaaaatctagttactcttatgtttggcatagtgaacaaagaaaagctcttatgtttgccctagctagctagctttgcagttcaagactatgaaagtgactggaagggcaaggatcttattatgttagctttggaattactttagcagcaaggagcccctcaatcaccgattccccttcttggcgaacatcctgaccaggttcagagatagaaagtactttcactgcgttgaattctccatgtccacataaaatttcacattttttttttagcaataaacatgaaaatctcccccataaatatagagcagttgctgtgtctctgtctatatatccaagaagacaaagtagttcagaagcatgtatagattcaagagttttctgttggctgtcctttggagttcctctgaacgcttcatgttagtgaggggggtagccagtgtaaactggactggtacccattattataagccttcttatgaagtgtttgggggaactcttgggttcaactaacactactacaagtgcaaaccctactaccttgtattatggctatgatgagttagaaaacctttacattaccaataattacggctgatgtggtcgcaattgtgatcatggtgcgattgtgaagtgttaaaatatcttgatgttgcgactacaattacaattgtggatcgcaatttaaaaccatgccttgtacacgaaaaccacactagtaattgctagctatactagatattattactaccttcaatttctctctctactatcttctttctaatttagttctatttgctatcaaagctttgtaaaaatttcttgagctaacttaccttgtccgtggagcctaggcatgtgttcagttggattttaaggctgtaaaacttaggcacaacaatgttgagttgaacatatcttaacaagtaaagttgaaaataataatctaaaagtagttgataatgtacgtacattgttgtcggcatatatccctattcatatgtgaagtttttgattgtgagcttttacaccttgtgtcttgatgggttaatgaaggtcatttaataaattttgaggatgtataggtgtgactccacgggaggaactgggtttatgcatcccaagcggctacccgggcatgacacatgttgaggaagccacagttcctctttggatcatatatagtttgatatgttcgccaaaaggttttgtctcacatgtcatgttgatatcattttaccatatttgttaggaaacacatttgcctggtcatttgaatgagtagttattaacttttctcatgcatgagcattagatttgatttacattaacctaacataattaatatctagagtagttatttaaaaatatatgctgatatttcttggacattacattaactcccttatagttatttaagttatacactgtgaccccttaattattatttgaaaatattacgtcagattctcctaaagtgaggtttgtgtaaatgttaaaaaatcacgaaaagtttgtataattttataaaactttagtttgtataatgtacttaatgtctatcatatatgcgcagattgtgcttattgtaatatttttataggagttgtataatatatgtcttgtttctccctcactctctgtatattgtgtgtgtatgcatgtgttcatgtggtgatcatgttcaatttgtggtacaaaacgacacacgagattacttaagattgagtacgtgaagggatctcatcaggaggcatgactatttgttttacaaggattgccatgtgagttataatgaagaaagttatctatatttatacctattttccctcgttgttccatacattctttttctctgttaggatgactgtggaaccaacttatccgtctagcaccagaggatagctcctttctatgtagactccaagagaaggattactcttatcttctatacatgtggaccgagtccatgatacactttgtgcatatctagtttataggagaggacccctcaaaggtctcgggtgtgtttggtttaaccttagttgaacaagcacactttcccataagcattttgtgagaagtagaagtataggaactcctagtttttcattcaattggtcatttttgagggtctcccaatggaaaactaaacatatacttctcagttctagtttgagtagagttttcttgaccgacataaggtgttatgagttcttcttggcaggaaaggttacggtgaccatgacgacattagatgcaattatcttatctttttttgtattttggaatgtatttaattaatttggacccaaatctttttagcccattatctttaaatagaattttctacctaatattaaggattctaattttgattagcatatgacttaaagagaaagtggaggatcatcttctacaactctttttctatttgttctatttctcttctattatttgattgtttttatgaccatgagtaaataatctctttatacaagcattgatgcttagttcttgataacgtaaatgtgtttaatggctatattagttttttgttctttcatttattttttagattcaatttatttctttaatatttttttaaatcaatttgattttttaatttttaaaattgttttaatattgttctatcatctaaattggatcgacaatatttaggaaatatgctttgtgatggtttaaaactgtcatttagtgattttaaattgtcacaaaacacatattttttaatactgtcaatttaatttagaaaaaattagattgaatcaattttaaaaattagaggattaaattaaatttaaataataaattaaagggctaaaaaaacaaatttaatatactatattaacatagtaatgtcgtatttaggaaaatttgttgatctttagttgtaggattttaaaataattaaattagggtgcatggtcttttcattgtaatgtcatattttaatttgactatatataatcttgtcttttaacgaaactaattagtttagttgaaatctaaattagttttgtatgattgttgtatttaaatgatcaggttgtacgaacttaattagttgtagatgaaatttagttggttttttaaccattaccttggttatggataggaagctagcattagatggcctaaccattgcacatggtaaccaaaaatttaatggctagttcgtttatgtattatatgataggcttaattattgttcttaccggatttcatgtcttattagatttgacaggatctctttatgatgatgttgttatttacatgtgaagatgttctgacactcaaattagtgacgtataagtatgaacatgtatcaaaataagttgtattaaggttaaattttaccttaaccttggagacccttttataagttaagattggatctctgatctcaatctcccttgttagatagtataatttaaaaaaaaatgatcttatcttattttttctctaataaaaaattacacaaagaggaattacttcttattttatttgatcggaaatagtgcatctagattgattcctaaggcaggtaatgccgaatcaaggataaggcaataaagtaagaaatgaaagttattcgattgtaggggacattcttatcttttatcaggtaaaagatatgataaaatttttcttttatcttaattatatcagtcaggatatctaaattccaagtagactacttgatcaaccatcgattacgaaagcttgtcaactctaaataatataattatgttttaaatctcttaaattagggggtcagtctttttagttctcaaaaaataatcataaattttagtctcttaaattaaaaaatcttttacttaaaattaaataaattcaaaactctttagtttttccgccagaatttaagagactaataaaatataaatttttatttgagtgaaggaactaaaagaaatattttttagatttggaagactaaaaatactgcagcatacgttttaatttgaaagactaaaaataaactcttaatttttttttacataacaaactctaatttaagagactaaaaacataattaaataattaagcatataaaaaatttcagaagatttaagagctgtgaatagtaaaaaggagaaaccccccatccagatgaattgcacagcaatgcagttagttgggctttgggcccatgggttcatattattttatagttaaacatatgcacccgggtcacacgctagttctgaattagtcctaaaagtgcagttgaatcaattcaagaaaattaaaatccaaaaacaaaaaacaaaaaaaaccgatttgtggtgtgtgtagcttctaatatgacgacagaggtccatataatgcgtggacattaaactcaccttctctgtagccatagaatttcacattttatcttttgcattgagcaactaactcactcgcgccatggctgctaccatcatcaccacatgcaagctctcactgcttttgagtcttctctcagtttcacttttgctgggtgtgaggtctgatacccttcagaatgtaggcgcaattccccccacatgcaagcgcatagagtgtcccagctatgatgtcattcacgtaggcaacggctacgaaatccgtcgctataattcacccgtttggatttcaaacagccccattcaggacatttctctcgttgaagccacaagaaccggcttcaggaggtcatttttatctctctctgctaagtctaactttttcaatatgttagtgttcatctaagggtcgttaagaaagaataaaaggaggcaaaggttgccggtatgatccttcctactaatataaatttacaaattaacatttgtcgataaaaaaaaaatctatgttaactcggttagtaaatccagtatgttcatccagtattttaacatgcactaccgacaaatttgtttttaaaattgtgttgtacaaatgcctcagaagggtctttgttcaaccctgtttgtcattttggttaataagcaatttcactaacaaagttaacatactgaatataaataacatgttaaaattttagagaaactgaaatgggataaaaaaaaaataaaaattggagggaccaattctagatttcatatattttagagagaccaaaaacatactttatcctaagtaatttatatagctcgaactaaattactatttttgttcataagttgtgtaaactgggaaaagttttcagcaagagtaagtgcataggacagaggatagtaccatccaaggagtttgattaaatttgagtaacctttgtgttttgcttaggttatttgactatattcaaggtaagaataactacaagcagaagattgagatgacagcacctgtgatcagtgaagtattacccagtgatggacccttctgtgagtcctcatttgttgtgagcttctatgtgccaaaagagaaccaagcaaacccgcctcctgcgaagggccttcaagttcaaagatggaagaccgtgtttgtggcagttagacagttcggtggatttgtcaaagattctagtgttggggaggaagctgctgccttgaaggctagcattgctggaaccaagtgggctgatgcagttgagaaaagccagaagagagctggccatgcttctgtttacacggttgcgcagtacaatgccccttttgaatatgacaatagggtcaatgagatatggttcttgtttgatattgaaaatgaactgcaaaccgtgtgacaaaataagctttcaacatgaatgcaatatgcatagtgcagactgaggtgtaaggacatcttgaatggatgaataaagtgttttgcttttagctaaaacactgctttctgattgacttgcttttagattcatcatagctatatagttcagaggcaattttactcttgaaaacttttcattatgaattgatatgggttttgaagtgagcatgtggtacatatctatacttttttctttgtttgtttgaaagaaagaatttgataagtctgcactcaaatgcattatgattgccaccacctgagtatcatatactttgtgaatggtgtttacagaaacttgagtcttcagtactataatttacatgttatgaactttactgcagatagtgaaaattagaaaacaagacttgataaaaaaaatgtcaacaaaaggccgaatatgtttgcaagatttcgtcaaatcagcattcgaaaaccaagttttgttcacattgttagtttgaattagtaacatttctttcctttccttggcttcaatatagattgattagtttagttaaaaagcagactatcacgttatatgggtttctttttcatgataaagtttattcgaaatttcaaattacggtttctttagattaataaaggagcaaacttgcattactgtaaaatagattgagaatttgagtcccgctgcttcaaattaacgtgccttgagttgcactactgttacaaatgctcacaactgaaccacattttataactgagtgatgagcaactagcaccagacgcaaatttatttattataactaggttaatgaagtagtaaaagaggtctcaaatcccaatttgcctgaatcaaccatttattgaaaattttgatccatggtgcctgctccatctaaataattcactgttctatcagttagaattctcattcgtaggattagtgtttaaggtgactacaagacaggataccaaataggggattactctgataagtatatatacctaccacagccatcattaggggatggttcaattcaagaatggcttatgcactctttgaagagaatggttagaaatgaaagaatttaacatgtataaaccttctcaggaaagaacctggtaagtggcctactatttgaaaacttcagcagcgaagagtttatgcaattttctggggagtaattgaagataaatgaaattgcatccatatttgcccggatcaccacaatctatacagctgaaggattcctagtactctcagttgtgaaagataatacctcatctggacttttaaaaaatgaacaatcgattgctgcagcatctgaaaactctcatttagcacaactgtttttttgggacaggacctttctgttgatgcttcatctaagataaccattagagggtcattgaagttagatctaatttcttgtctggtatcagagaaatgctctctatgacaacaaattatctgctgcaatgttatgtcttgactatatgtccctctactttcatgctatccaataaataacttttatgagaaagtcatctagatggaatcaatacaagcatattgacataaaatgacaataaaatccatcattcaaacagagccacaaaacactaaaatatgtctaatttatgtaagctctctaatataatgtcagcattgtaccattggaaaggttgaccagcagccagtttatgtatgacaaaagaacagattttagttttgcaaagaactgtctgttttttcaaaatctgtctgattttccaatttggggctgttaagccagttttttgatgatcaatcaattttttgggttatgcaggacaagccgggttttcaaacacttgttgacaggtaagttataaatgttgctaaagaaatcagtatatatatgatgattatcagattaactgccaatgctttgaaggaaaacagaaatataaacctgacaacaatgaaatctctaccttatgttgaataagatatacactccttcagtccttctaacatcacctaactaatatgcactggctgaacctgttgactctgaaaatttaaaacccagagacaatatatagttcaagaaaattgttaaatctgatagtgaatatagaatactattctaacaaaaattacaactataaatgttatagctaaaaaaaactgtggttactcacttactcccaccttttcctgtagatggaagtcatatgaggattgaggacataagtggaagatatcagaaacccgttgcaaaaggactctggcatgtggcaaataagcagtggattcacttgcactaaacataattataatttagagcaactggcgcagaatcttgaaagaaatgatgttttagtgatgatagctatccttattcaatggtatggggtgcattgccagtgaaaaaataaataagaatttacatatatataacagtagcaaatcttccaagtactatttgagagatggattacagatatgaggagtactagcaagagactctctagcatactcctcctgacatacactcatcggatgaatttttttgaaaaatataaaatcatgagaatcattgaataagatttaggacccacaattttgtatgatttccaaaaaaattaaaccaattaaaaaggatgtaatagaaaaagtatgtcagagaatatgttgctagcatttctcttacagatatataatataaagataaatacattaccactgatgataactatccttattctttgaaaattgatcccccatctaaattgatcccacggctttatattttccctccaccagctattccaacgactgtctcctgtgtccttgacagctattatcatcatcataatcatcatttaattgaggttctgattaactgttcctggtttctaagtgtacacccttttgatgggaggtatgttaacataattataggattttagcagaaagaacctaaggacctagtcatgtcattgttcataaaggttcagccattataattgattacaacaggtattaaaatacgaaatttgttacaaggatttagccacacactgcaatgaagaacttaaaaattgtcacgtctaactacttaaaccaaaaattctccactctgaaactgtcgcgtctaactacttaagacaactatcatatttatattatgaaacaacgtgggccttttctattctcttttagggagctactattcatactacaaaagttgtgtttctcactagcaacgtgtgtagggttttttttactaaattccaaaaatatcgttcacacaaaaacatgattccgttgttcactttgaaacaaaatcgtatttccattgtatatattttttggggtgaaaaatattaaacaacatgtttccgtcattactggagagtgaaaaattaaacagaaacaagattttcttctcgctttcctctttccattgtttcatgtttcaacttttttcatggaatttaaatatcaggatgacaaaaaccacaggacaccaataccaatactgcaccaactttctaccattgcctacatgaatttagatatctctggaccctcattacaaggtaacactattcttcacgttctttttaagagacccatttttttctgtttataaaagcaaaacttttgccacacaagttcattttattccctctgtgctcatttaccccgtttcccttgagccaatgtatgaccctctgaccatttgcactaactaagacctatgagaggtgcaacattctcaaatggttcagtttgggccacttcacattccccaccacaatgcaagagttttgggatgattcctctcgaaatataaacttgatttgggcctaaattaattatttgattccttggacttagttattttgggcttaagtaattatgggtcatgtttctagagaattcttgtagtgtttggagtgtcggttgtaatattctctagaatactctttggatatctagagttgagaactctctagaattagtgtgtctagagttcttcttagagtagtataaatagagatgtaatcctacacatttgtatcaagcaaaaatacaaagttctctcctccataaagaattctccttcctatcaagtttctattcaaagtcttcaatattccttctaaacataaaaagccttatttccaacaattccctcactcttaacgccaccctccaccatttgatattcacttggatttctaagtaacctccttctccctttttcttaatcttaatttaaatttttattctaaataatatttggtaattatttttaaaaataaaaacctatttcttatgtagaattccaactcagacatagagtacatgtgacattatatgtagcttgccgatgtgccgagttatcaaagatcaaatattaggaacctatcacgaaggaaaaatttattaaaggccaaatacaaaatttagatatatatcaagaaattaaaaatatatttaaaccttttgttaattaagcaaatttgttgaatcaaaggaacgaacaacttagttaataacattgacggatatgtagggccccaatcccaattactccaccaaagttgacattagaccaccttataagactaatagtaataaaaagggaaatatggtcatattggttagtgtatttatccttcttttttgtctttatctttctcttcaaattgaaaaaaaattcttctactttcttaatgaaagtttttctcttttggtttatctcattataggttaagtcagatgctgatcattatggaacaaagcgtaaaacaacgacacctactacaattgatgacaataagagtttggcaaaaaaacctaagaatctgcagtggcaatgtggcttatgtcaaattgctaccacaagtgaaaaatgattgaatgatcatcttctagcaaaaaacattaggctaaagaagcattcctgaaaacagatcgatgtgacatgttagtattttgaaaagagaaagtacttctacaattctaatatatggcaagtgtgttatgcggtaaaattaaatttaaaaaataaacaatatatagaatattaaattatattttttcaattttaatagagaagatattctcataaaaatatttaatgaaatatgatataaaaatatttataataaataaataatttatctataaataggtataaattggagtattaaggtaagaataatattaataatgagaactcaattaattaaactttataattattaattattttaaaataaatagtcttgctatgtttaaacatatttaacagcttgggttgagttggttagttagattgactaattaaaaaaataatgatttttttaaaataaaaaaaattagaaaaaaataacaaaattaattacttgctccaaaaatagaaaatagaaaattatttaaaatgtaagtccaacttttcaaatccaaacactatcataaaaatacatgtcccaaatagataatacatgtcacaacaatacaaataatatttattttattataactataatatggattaggttagtcgggtttgaaatccgttaacccaatacccaatcaaattttaattgaatcagctgaaataaacataatccaccctactatgtaggtgagttggtttgatcatgtaagcaggtaagaatattatatctttttttgttgagacccatctacatgtgtttatcgggacttctttaccttcatataattaattggacaggggtaatctttatgctccatcatcaacaaatttttatttcatcaaattaaaaaagagcacaatgcaatagaatgcaacatgatgcaaggtatgaacaaagactatgtatgattaagtagtcaggagttagattaatccctctaagtcagtttacctcgtatatatagtctcacattcctccttcaattatgcccccattatcattcaacactagcatatatacatctaatccatagtcatgtttccttggtgaaaatgaatcattttccttttaatgggaaatctaattccttaggaaaaatttaattagaactcccaagaatgcatatatatgaattagaatttatccttagatatctgaaacttatggttcctaattcaaaccttgactcatatccaattcccattgcaatacaaagtcaacgatcaccaatcaaagaaactctatttatgcatgcatgcatgtactcgttgatactaataatccaaatagcaagaagcaagaacaagcctcctttaatgcaacacgttcatttggcaattgaacacctacacactcaaaggaaagtagaagtcattgcaatcaacaaatcttggaatttggattgcttgtgtgaaacttgagtccttattctcaatcaacaaattcaatctataatttatcaaaaaagttggagtgaaactgagccggatccattaaaaaatcattaaaaagattggaataaaaaccattatatttaatttatgtacttaataaaaatgaaatagaaatattgatacatttttatgtgagcaatatttatttcaatgtgaggttaaattttttattaaaattttaaattaaaattttaaattatcattttaacaatttaagtttgaatttactatttactattattatgcaaacaaatgaatataatcatcaacgattaattatgaaaatgaaatgtaatcatgaataattttgaattttttttaaagtggatatattttgagagagagagagagagagagaggataggaaaaagatgaaaaattgaaaatgtaataatatgagatgagaaagatagggaaaactagtaaatgtaatgggtaatacgacaaaaataagtaaaaacatgaaagaaaataattttagaaaagagataaaatatagtaactatgataggcaatgttcgtgaaaatttaagaaatattaacgatagaattaaaaagtgtataaattatattagtgtcaaaattgttttggtatacaatggcagtagttagaagtgagccaaagacttcgtgcatttactataatctttcactactaggtgaaccctatatgaactctatcaccaccactagggctactaaccctagccacaaaaggcacaagaacacaaaccgggtgcctcacattgccacccaaataactcacatgcagtaatctgaattcctcgagccttatcaggattatttcttatgctctatggcaacatacacctcacaacttcttgagccatagaaacaactctcgtggtaagtaaaaaggcattgcctttgtggaaactttcagccccaaatggcaccggatccgggttggatccgagatcttgtgtgaccgaagattcagccctttcacgaacataaccacgatgtctccgtgaagggtagcctcgtactccaccctgtcccaagattgagccgtttagttcatcaaaacgcccaaattccaatgacccacctcgtcatgccgccgcaagtcgacgacttgggaggcgccatttgcagaggagtttgtttggggtaagtgggcacctaacaatgaatcgagattcgtcataaccgttcgtggacaggaccggtcgaacctgaacttggaaaatcgattcaggtgaaccggaagaggaagcgttggggtggagcgtgtagtagacgcactttagttcgtggagattttgttgttgggagttggtgataatgaggagttggtggtcggggaagaggatacgatgttagagggtgtggtaggttgacgagggtcaagaacagagttgcttggagaggaatagagaagagataaagttgaggttgtgagagaaggtctaaaagtagaaggggtgaagaagaaaaaatgatggtgggaagataaaaaagatggaagatttaaattaaagaagcctccacagaggggatgtttgatttttatttttttttactaatgatttttaatcaccaaaaaatttaaatttgattttaaaataaatattaataatttttaagtcgttataaattatattttcaaatatttagcggacatgttattacttaattgaggtatgaatttaaaataaaaaaatttaaataataagaagcaaatttattagtgattaaatataaaatttaaatatatataaaatataaaaacatatttaggcctactttaattatattgaaatatttaaaattttacacttcatcaatttttttctcatttttatttatgttttaaaaatcaaaaaataaaatcaagaatccaaactggcatatactgaaaaaaacgtctatttagaagtgagaaaatttatgattttagttctttaagttttcacaaaattttacttttccttaaatttttatttgaactgtcttaattcttgatttttttttatttagttttagtcgttagtgacaactggctattaaattgaattgtttatttgaaaaatgataattaaagtgaatagtgcacaattacaattaatgaaaaaatatcggagttcggatatatacataagatcacatctttaagtttgccctagctttaaagttcatgactatgacagtgactgaaagggcaagcatcttataatgttagctttcgaattactttagcagcaacgagaccactcaatctccaactccccttcttggcaaacatccagaccaggttcagagatagaaagtaccctcattgcgtagaactctccatgtccacataaaattcacatttattttgatcaataaacatgaaaatttccctcataaatagaacagtcgctgtgtctttgtctatccaagacaaatagtagtgaaacatgtataattaacttcaggggctttctgttggttgtctcttggagttcctctgaacgcttcatgtgattggctagttataggcctttgatgaagtgtttgggggaactcttaggttcaactaacacatcaaagaaaaaatatgagtttaattcccaaaccacctatacacaggtagtatgaagtttaattttccataaatttatttattttttgcaattatagttgtttcacttgtttggatcattgtaataccaagaggcattacactaatcgctcaagtgtattgttgttaactttatgcaggtgtttgtctcatttttagtcacgacaatcatctgatgacattctcatttttaacatatatgtacgatgctagatttcagtctacccatgtatggagcccaccctactacagccagtgtgaaggatctgttacctcttcacaagtcatgaggacacaaagacaatgctcggttgttagaatatcgagttgtgaggaggacccctcccagaattctcaatattaattgatcgagagtagtcttgtaaacgtatagcttaatgagtgtaggtctgtttagtattaggttgttttgttgggatctctctatatatctaggcatctagctatgatggatacgcattttcctattgagttgacagacatttgtctttaattaggtgcatgactttttgtattaattaatttatattgacaattgaattacattgttagtcatgaactaaagtttcaccggctttattgtagttgttaaagtttggtttcattaatgcttttcgtcattattgtgaaataccatcaataaattatgacatgtgacattaattttattaatatttatcaggttttgtgtcatttcattttttggtgtttaaaattaccagaaattactacactccgctaataatcatgaatatgcgattaattcccctcaaatatattaaaatccacactatttttcaaaccaaaatcaaataagttcacaaatcattaagcattattttttaaaaaataacttgggacggaagaaatatatggtcgtatttgtgattttcatatgcttttcaaagatcaacactaacatggttattttgttaacgaagagggaaggttaagaaattttccttagcatgcttaaatctccccatggtgctgtatgacgaaataatattaatcatgaaatgctatatcatgaaaaaaaaaaaaaaaaccctccaaacatgtgcaaatctagtgccctccaatcacgaaataataaaagaattatgatgagtaagaagattgaaacgaagggaaagtgaaacttaaaaaaccctgaaacaacttattcatccatcaacaaacacactcaattcgatagtcacagaaccaagatcttcactttgcgaccctagtttgggtcagtgagagttatggtaggaggcggtggcaggggggaggcttgtgttgggtttcatgattgttgcgacaaacatcccgtgaacattgttgcaaggtgctggcaccacctttgtccaattgcctaagcctgaatccgagacaacgtcaacgatgttaactatatggatccgcactgcaaagagagaaaaagacaaaccagaagaggagaaggagcgcgagtgtgagagaataggggattagggttttgttgttgttttttttataaaaaaaattgatggagaaagaagaaagaattgttttgggttgttgcattttgaatcttaaaaaccacgtaggaatcgcctcctatttttaagtaaccttaaccttgatttgtttctcagtagccaactgtgtatctctactaaattcacttctactgaatcctcaatggccaaatatccacttcgatctattgaattcccaatagctgaatttcacaatagctcatgccacttctactgaattcacttcacattgttacagcccaattggttaccaaatgtttgaatttactcgcatggtcaaccccaatatatatatagcatctctctatctgttaattagtcattcagtttatgttacggaaattcaatttttgagtcccaacagaggtgtagtaagcaaaatcaacaatcatcaatacaaattagcaacccactaaaccatgatccaaccaagcacttttcaaataaacaccaaatccttccatttaaatcttattcccatgaacccttttgctctacaggtaacatacacacagagggtgagtaggaggtggcaatggtggcaaattaaagagcaaggaaaacaacaacgagtttcgatgttgcaagaaatttcatgtgtattatggttgttcatttgtgtattatgggttttgatctttcttacttcatcttgttttttcaaaccctttttctgctagttgccaaaaaaaattgtagtaccttacaaccactagatcaaaatgtcttgaattagcaatattttatcatgtgattattacatcatagtagtccatataatagtctatataataagttatgtgagtgccacaacatcacttaatagtgataatagacaagaaaaacagaaaaaatgataaacaatacctgagagactaatatcgatcaaaatattgttatgttactaaaagcaaattttttgaaaagatgaagactaaatccgatcaaaaaattgatgggctaaaagcaaatttcacaaaaagaataccaactaaaaacataatttataaaaaaaaattacatattatctcataagactaagtgatcaattgtataataatttatgtgattgtcacatcattacttaaaaatgattttgataatagagacaaaaaaatattatcttgagaaaagtataaatactaagactagacaatttttcatttagaaactaaaatttaaattaaaaaaaattagtgaagaaaaccatatttaaccattaaaccaataaataaatgtagttaattaactatcgagattgattattgaaatgaaatattaaataaattttaagaaataaattgaaatgtatattttcagagatgaaaaataaagagaaaataaaaaaaatgtagtatttaaagtgatgaaaatgaaatatatatatatatatatatatatatatatatatatatattgagaatgtataaaacattaataatattttaaaatattatcaactatagtgtctaataaattgataatatagtctaaaattaatatttttcacagtaaattaaattctcgtgcatataaaatgttgagttgaccaatatataattaggcacaattaaatatttataatattggattgatgattgacctcattggaatttattcactatatttcagaaaggagaataagaatactttttctatgaatacgcatagaaaggatgcacttccctttctcacaatatatgtaactcatatatgtatattttccctagctttagtgaccatgagaatgactgaaagaccatcaaaggatctaacgttagcttttatgttttgaatcactttagcagcaacgagcccacttcgccacagactccccttcttggcgtacatcgtgacctggtttatagaaagaaagtaccttcattgcgttgaattcttcatgttcacataaaattcacatttacttttatcaactcatgaaaaataactccccttaatgggaaggagttgcaatcagaactgcaaccgggctcgagggaaaggcccaagaggaaggttactccaccacgatacctcaaggactttgtctaacagaatttgactcagctggcacgagctagagatgttgtcttgatcctgtctgccattttttttcatgctttctgttataattctgttatctcaacattttacttgctgctatatatataaatgatgtaagaaggcagagcattttgctcaaaaagaaagatttaagagagaaaatttacaaatttctatataatttaacctcaaaatatatcagttatcaatcctctaattatttcttctaagatgtgtatacaagtgttgctagatagaaagtatatatggtttttactccctctttcccttttttggatgtgcatgcaattgacaacgacacactagatttgattttttcctacactcatcttctcattttcttaaacaatatgatcaaggaggaatgtaggtagaggggacacccatggccaggggctctagcacccctccatcagacttcttataatactcatgtgttactactcaatatttaatgggtcaaataggttgtatgaatttattactgaaaattggatgtgaagatgtagctgaatttatttacctgatcagaatgacggtgggtgatgtttttttctttttcaaagaaaattgaaattgaaacgttgtggaaagggaaggaacgttcttgagatttttttaatgacgataggtgatgttatgtaatttttattattttttaattgatatttaatatttttttaattattcatatttattatttttatacataaaaattaaaaaaaataaattaattattttatttgaacaataattaagttataataaaaaaatataaatgtgtggattttttaaagtttcttatgattttttagtattgaagtaaaattatgtataaatttatttgagtatgaattgctttgagtgagattccacctttttgcttcaagctatcaggaaactgctgttgttgcttggtcttttaggaatccctggttaaattaaattgtatagctttaaccaaatatttttgctttagatttagtcatattccgagagagtaatgcttgtgttgataagtttgtttcctttaatgctcataacacatattatacttggtaggattctctctcgttattcatctcagaggagcttcttagagaaaggcaagggctccgattgtacagatttaaataggttctacccttgggttttgattgtataattaatattcttttaattttttttattaagaaacatttagggaaaaaatatagaccttaaaaaaatagggaattatggttgtataataaaaaaatattgttaagcaatgtatgtctttctaataaaatatttttttgttaattctttaattgttgtttagagccccaattaaaatatcattttggtttattaaaataattatgcaaataatttattttaaatataaaatacatttatatatttaaaatactattaattataaattatatttttaactataataactttatatatatatatatatatatatatatatatatatatatatatatatatatatatatatatatatatatatatatatatatatatatatatatatatatatatatatatatacacatttggtggacgttcaaaaaatatattgaattcgcacatttgtatatctttgaaaactccactagccttatcataatatgtgtcttagtctcttagataacatgttcgcttaaacaattcatacttaattaaaaggatttaactcattcagttaaataagatttgaattattataaatttctaatattagtttgatttctaccaatgaaagaaaataactcatgcttgtgaatacaaccatcacacaattaatccaatatcaactgtaaccctacccaatgttataagcacaaaaaatctcaaagattaaggttataggaagacgggggctaaataaattttttatttgaaagtttttttgtcttgtagcattaaatcatcattatttatgcggtcttaataagttttatgaatagaatccttaaaatttcacctggaaatgttaaataagttttattaatattcatactatagtatttaaatattcaccaaaaatagtatttaaataaatgtttatagaataaaattaattaaaattggaatttccaaaatgcttctattttattatatttcattaaacctcaaaaactcatatctgattatccttacatcattttggcttaattttattattttgaagactaaaatgatgtcaattttcagttttagtttttgcagaattttctggttatgttttatgtaaagaaaaaaaaatcccttaacccgttttatcttgaaattataaattctttcaaacatgaccaaataaaattataatgattaatattatgaaatgaacttaaaatggctgaaattatagtttatccttcttttttttttattaaatttcacaaatgtatttatacatagcttatttaaatttcaaaattctcgagaaattcccatcctaattttaaattttttttaccataaattaatttttatcattatcataatattaattttgagaaataaaaatactattttaccccttttcatttaattatgaatatattactcaaaattatgaattgactctttccaggagaaattattagcaccacatcatttatgatccagctaaaatactcattttacacgtggacaatcaaagaaactcactaaatataaaataaccgaaagcttacggtgtttaacaaaagagcgcatctcacatttaagtaatcaatacataaaaataataaattaaaattaaaaaacagagagacttttactccatgaacaatttcctttgttccaaaggatttggctcccatgaaactttattcgaaaaagaagaaactctttttacttttagaagctattcattttcagaatgatttccttagttgtgtgccggcagcgccgccaccttcacgcggtggctttgtcacggtagcaagttggaagaagaaatgttccttatagtgtaaagttgatagaatacagtaaacgatatgtttttggaatttgaaacccgatctgagtttttcattattagcgataatatttgaaatattaaaaccttgttaaagtgacaaattttccacatgtcaaagatttattgactgaaataatgaataatatgataatcctggatcatctaatcatttctcaattttaaaccctcttttttcaagtctcttaaactttaattaaacgtttgtaacactataattgggtgcaataattagttccaaacattgttttaagtaaattttgcatttttattaagtttcagtattaattaaaacttcacttaagcttatgaatatttgattaaggcttctaggtcttgattttgttttgttttttttactaaagttatgtctataaggaaactaaagtactataatttatctatctgatgaaaatgaaatagaaatattgataatttaagagacttgaaaaaaagatggtttagaaattaaatagcttattaaaatcaatcaaattttttaaataataaaaataagacatgtagtatttaattaagattattaggatttttttaacgaagttaataaaatccattgatatttttaattaagattttttataacttaaaaaagtcttttgatatttaaaaatataaagatttcaatggatttttttaagatgaattttataagattttttaataaaaaaatatatatcaaataatcacacataaacccttggaatttcttgagaccttttttcttttttcttgtcaattgacatgtttttcttttttttattatatataattctttgtttctgtgttgaaaataataaacattcataattttttttctctttcaacccatggacatatctcagaatgatatgagattttcacaattcattgaatttgaggcatcttgattacatgtttattttcaatgaaagtgagaaattgattcacgtataagttgataaatatataaatgatttttttgtacatgagtttttttggtacatctataaatggaatttgaaataattgttgaacatgttttttgtttggtgggatcgttaattgtgaaaatgattataaatattcatgttattgacaaatattgtagtatataattttttataattaacatgatttaagattgaaggggaatagacctattattatgcttgtaaatatgctaggaaggagaaattgatttattatgtaacaagtttatgattctttgtatatgatgaattttatttaaagtgttaggtgagaaaaattcatgaatctttattaataattttaatttttttaaaaatcatggaatcctttaaaattttaaaaatttataatttcttttcaaatcttaaaaatttatattttataaatatattaaaattcaaactataaatcttaatgataaaagtctttaaaataattttaaaaatcattatatttttataaagtcttttaaaattcaaaaaaaaaattatgtcaaaataatcttttaaattctaattcaatacacagtttttacagtttttttttatgaataggcatagaaagtatgcatattttcccttattctgcatatattttgcctaatgacttcgaaaatgactggaagggcaacaaaaaatcttatgctagctttagatgtatgtttagaatcactttatatagcagcaacgagcccactccatcactgagtccccttcttggcaaacatcctgaccaggttcatagaaagaaattaaagtacaattcataaggtagaattctccatgtccacataaaattctcatgtattttgatcaattagcatgaaactctccaccataaatagaacaatttctttgcctttgtctttccaagacaaaatggtagataagcatgaatctataactaattcagggataattttttctgttggctgtctcttggagttcctctctgaacgcttcatgtgaggggctagctattgtaaacgttatatgccttcttcaatgaagtgtttgggggaactcttgggcatcaaccaacactgcaaagcaaaaatgaaccaaacccttatcattcgtcgcaattattattatagagattaaaatattgcacaatgggaaattaagcatgcaaatttaccttgtgcacgaaaaccgcaggtatatattaattctttctctatttgcattcaattatatccacaggtatactagcatccgatgaactgttttttttttcctttttcagttatattatttatacaataattctatatatatatatatatatatatatatatatatatatatatatatatatatatatatatatatatatatatatatattatctctttccaccttatcgataaacttattttacctttctttcttgtcttttttttacaagatttttatacaaaatttatgcagaaatccaatctctcttttatttttttcaatgacttacatatattttttatttatgaaaaatactcaaattttatgattattccctgaaaaattttctttgtggttgttccctataatttaattttgtttatctctgcagtcaggtttcatcaaatgattgttgatgtgtccaataaaagaacatgctacttgtccacgtgtgaaaaaaattcagatactttttaaattgattatatttataatcgacgtagaaaacgttattattctacattcagaggactgcaggtgatggaagaaatttttaaatcggttatattataaccgatatagaataataacattttttactccaattataaacataatttatttaaaaaattaaaaacttgatacattttacattacgcatggacaagtgacgtgtgctttttagcaacaaaaaatatatttgttataacatgttaacaatcatttgacgaaatttgacggtagctaggaaacagaaacaaaaaaatttaaattatagggagtaaccacaaagaaaaaaattaaatcaagaaataattacaaaatttgagtactttttagcgacaaaaaatatttttgagtttttttaatttaatatatatatatatatatatatatatatatatatatatatatattatttttttttattttttttaatttataatcactggcaggtagctagcgcagtcgtgactcgagagtggacaataaatttgagcggttctgaaatgcatgcatctcgcacaattttacatatttgaagtacttatttcgtgaaagccaaatttgtcgaatgtctagctaggttgtttacatttaaatgaagattgggnnnnnnnnnnnnnnnnnnnnnnnnnnnnnnnnnnnnnnnnnnnnnnnnnnnnnnnnnnnnnnnnnnnnnnnnnnnnnnnnnnnnnnnnnnnnnnnnnnnnnnnnnnnnnnnnnnnnnnnnnnnnnnnnnnnnnnnnnnnnnnnnnnnnnnnnnnnnnnnnnnnnnnnnnnnnnnnnnnnnnnnnnnnnnnnnnnnnnnnnnnnnnnnnnnnnnnnnnnnnnnnnnnnnnnnnnnnnnnnnnnnnnnnnnnnnnnnnnnnnnnnnnnnnnnnnnnnnnnnnnnnnnnnnnnnnnnnnnnnnnnnnnnnnnnnnnnnnnnnnnnnnnnnnnnnnnnnnnnnnnnnnnnnnnnnnnnnnnnnnnnnnnnnnnnnnnnnnnnnnnnnnnnnnnnnnnnnnnnnnnnnnnnnnnnnnnnnnnnnnnnnnnnnnnnnnnnnnnnnnnnnnnnnnnnnnnnnnnnnnnnnnnnnnnnnnnnnnnnnnnnnnnnnnnnnnnnnnnnnnnnnnnnnnnnnnnnnnnnnnnnnnnnnnnnnnnnnnnnnnnnnnnnnnnnnnnnnnnnnnnnnnnnnnnnnnnnnnnnnnnnnnnnnnnnnnnnnnnnnnnnnnnnnnnnnnnnnnnnnnnnnnnnnnnnnnnnnnnnnnnnnnnnnnnnnnnnnnnnnnnnnnnnnnnnnnnnnnnnnnnnnnnnnnnnnnnnnnnnnnnnnnnnnnnnnnnnnnnnnnnnnnnnnnnnnnnnnnnnnnnnnnnnnnnnnnnnnnnnnnnnnnnnnnnnnnnnnnnnnnnnnnnnnnnnnnnnnnnnnnnnnnnnnnnnnnnnnnnnnnnnnnnnnnnnnnnnnnnnnnnnnnnnnnnnnnnnnnnnnnnnnnnnnnnnnnnnnnnnnnnnnnnnnnnnnnnnnnnnnnnnnnnnnnnnnnnnnnnnnnnnnnnnnnnnnnnnnnnnnnnnnnnnnnnnnnnnnnnnnnnnnnnnnnnnnnnnnnnnnnnnnnnnnnnnnnnnnnnnnnnnnnnnnnnnnnnnnnnnnnnnnnnnnnnnnnnnnnnnnnnnnnnnnnnnnnnnnnnnnnnnnnnnnnnnnnnnnnnnnnnnnnnnnnnnnnnnnnnnnnnnnnnnnnnnnnnnnnnnnnnnnnnnnnnnnnnnnnnnnnnnnnnnnnnnnnnnnnnnnnnnnnnnnnnnnnnnnnnnnnnnnnnnnnnnnnnnnnnnnnnnnnnnnnnnnnnnnnnnnnnnnnnnnnnnnnnnnnnnnnnnnnnnnnnnnnnnnnnnnnnnnnnnnnnnnnnnnnnnnnnnnnnnnnnnnnnnnnnnnnnnnnnnnnnnnnnnnnnnnnnnnnnnnnnnnnnnnnnnnnnnnnnnnnnnnnnnnnnnnnnnnnnnnnnnnnnnnnnnnnnnnnnnnnnnnnnnnnnnnnnnnnnnnnnnnnnnnnnnnnnnnnnnnnnnnnnnnnnnnnnnnnnnnnnnnnnnnnnnnnnnnnnnnnnnnnnnnnnnnnnnnnnnnnnnnnnnnnnnnnnnnnnnnnnnnnnnnnnnnnnnnnnnnnnnnnnnnnnnnnnnnnnnnnnnnnnnnnnnnnnnnnnnnnnnnnnnnnnnnnnnnnnnnnnnnnnnnnnnnnnnnnnnnnnnnnnnnnnnnnnnnnnnnnnnnnnnnnnnnnnnnnnnnnnnnnnnnnnnnnnnnnnnnnnnnnnnnnnnnnnnnnnnnnnnnnnnnnnnnnnnnnnnnnnnnnnnnnnnnnnnnnnnnnnnnnnnnnnnnnnnnnnnnnnnnnnnnnnnnnnnnnnnnnnnnnnnnnnnnnnnnnnnnnnnnnnnnnnnnnnnnnnnnnnnnnnnnnnnnnnnnnnnnnnnnnnnnnnnnnnnnnnnnnnnnnnnnnnnnnnnnnnnnnnnnnnnnnnnnnnnnnnnnnnnnnnnnnnnnnnnnnnnnnnnnnnnnnnnnnnnnnnnnnnnnnnnnnnnnnnnnnnnnnnnnnnnnnnnnnnnnnnnnnnnnnnnnnnnnnnnnnnnnnnnnnnnnnnnnnnnnnnnnnnnnnnnnnnnnnnnnnnnnnnnnnnnnnnnnnnnnnnnnnnnnnnnnnnnnnnnnnnnnnnnnnnnnnnnnnnnnnnnnnnnnnnnnnnnnnnnnnnnnnnnnnnnnnnnnnnnnnnnnnnnnnnnnnnnnnnnnnnnnnnnnnnnnnnnnnnnnnnnnnnnnnnnnnnnnnnnnnnnnnnnnnnnnnnnnnnnnnnnnnnnnnnnnnnnnnnnnnnnnnnnnnnnnnnnnnnnnnnnnnnnnnnnnnnnnnnnnnnnnnnnnnnnnnnnnnnnnnnnnnnnnnnnnnnnnnnnnnnnnnnnnnnnnnnnnnnnnnnnnnnnnnnnnnnnnnnnnnnnnnnnnnnnnnnnnnnnnnnnnnnnnnnnnnnnnnnnnnnnnnnnnnnnnnnnnnnnnnnnnnnnnnnnnnnnnnnnnnnnnnnnnnnnnnnnnnnnnnnnnnnnnnnnnnnnnnnnnnnnnnnnnnnnnnnnnnnnnnnnnnnnnnnnnnnnnnnnnnnnnnnnnnnnnnnnnnnnnnnnnnnnnnnnnnnnnnnnnnnnnnnnnnnnnnnnnnnnnnnnnnnnnnnnnnnnnnnnnnnnnnnnnnnnnnnnnnnnnnnnnnnnnnnnnnnnnnnnnnnnnnnnnnnnnnnnnnnnnnnnnnnnnnnnnnnnnnnnnnnnnnnnnnnnnnnnnnnnnnnnnnnnnnnnnnnnnnnnnnnnnnnnnnnnnnnnnnnnnnnnnnnnnnnnnnnnnnnnnnnnnnnnnnnnnnnnnnnnnnnnnnnnnnnnnnnnnnnnnnnnnnnnnnnnnnnnnnnnnnnnnnnnnnnnnnnnnnnnnnnnnnnnnnnnnnnnnnnnnnntatgtgccagtataattagctgatatcgacttataatctgtcgtggtcataactatacgaacataattttgtttgaaagtgttacatgttataattatatatgcagccgctcttatcattatattggagtgtctttgattccaacagttgtgaccatcataggtgcatttcttttcatttccattttaagggctgacattgcctctactttcacgctacttaattcctacagctcgatcagtacctctaccatatttaaattgaatattgaaaaataaatctacactttgaaatatactattgcacctcaatttactatgctttgatgtatgtgtgttttagcaacttgaaagcactatgattttaccaactaaattattaggatggtttgtgttccttccatgttgtatgttatgattgaccatatttttaagtgatacttaacttttaatattatgaaattatgaatattttttaaattttttgtttaatattcattatattaaaattataaaaatattatgttagtatatattgatagttcaaagattgtttgcctataattggaacattcatccttgaacatttgctttcatcagttcaacacaatttgttcagtttttaaaacagtgtgattgcatggtactccaataatttagtagtattgtataaccccaataaggcaattcaatatccaccacaaaggaattgaataaatgagaaatgacacagcaaaactgacaaaaagacaaagtaatcgcattacacgcaacaaaaccggacaagacaccattaattatgtaaaggaaatcacgtgagaatttatataactcaaaaatgattggacaaattaaagctcaacaatctaggtcttcatttgaacccaaaaactcatgacgcacatccaggtctgcatttggacctaaagatgacgcacttgagagatgcaatgtcattggtgttggtggtcactttaccgtacaaattagcagcaatacacatagtaaattggaataatcctccatttgcaatataaaaaaaaaggaccaaaaccatagaggaatgaggcataacactaaagccatatatatcatctgcgcttatataagtagcagcagccaagcaattcgtccacgccctgtacacaacaaaagaaagcaatcccaccacttattatagtggccaatcttcccattcaagaacaagcaagtggaattactttttcttttaaaaaaattctcaatggcgcatggccatcatttgagagcgcacttttcaaaactctatatatcataaaacttcattgcattttatgtattgtttaattttaaaattaaattttatgttattaatatttcagttataaaaaatggtattttaattaatggataatattttttttacttaattatcaatttggttcctttatttatttagaatttttagttagatctttctatttttagaagtttcaatcaattctttttttaaaaaaatcattcaaagtagttctttatttttattttttttaaatgtctcattgtgtagtcttttccgtccaattgagactagcgattataagttgcaaattctgatagaaagaatttgagacagttttaaaaacaaaagatcacattgagacgttgaaggatcacagtaattataaataataaaataagatgagattgaataatatattatccaacgcactatctgattttattttatttttatcggaaagaaaacatatactccaagggtttatgtagtctatgtagcgataatgtaaaaagaatttatcctattatttattataaactattatcgtaaatttaattatatttaaaatataactacatatcttaaaattaatatcaatgattatttttgttggttgataattcaaaatttaaatattatttgtaatatctgattgtctgtggattctaaacaaattcctttttttctaaatacataagatcacctcttttatttgccttagctttaaattttataactatatataggcttaaataaccttttgttcttataatataggaagttttttttattattattttagttcttcaaataaaaaaaaagttgttttgattttcgtaatttaaggatattttagttcaataacattaaataaagacattataacaacgttagtaactcattaacatgttacgtcatcaaaaagttagagatgtatttttttttttaaattctcattaatttattctaaacacataacatatgactaatttatgaagaatttaaaaatttaatttattaaaaaaaattatgtgagtatgctatttgattgtttgatgatattacaagtaaaaaaattactaataatgttataacttgaaaacagagattaaaaaaatctttaaaggacttaaaaataccttattttacaatgactaaaaggttattcaagctactgtgtgtgaaaatgacttgaagggcaactatgcaaagatcttactatatatattatgttaacttttgaatacttaagcagcaacgagcccacgtactccatcagagattcgatatatatcccttttttggcaaacattctgacctagtttagagaatataaaaaatacattcattacgtatagaattctccatgtcaacataatattttgatcaataatgaacacgaaattctccaccttaaatagaacaattactgtgccagacaagtatagagaagcatatgttacttcagggattttctgttggttgtttgtcggagttcccctgaacgcttcaaatattgataggctagctagtctaaacttgtacccgctataggcctaatattaattacttgttccaacttgaagtgtttgggggaactcctggattcaactaacactgcaaattaagcaaaaatatcattcgaattcatttcattaattcccaaccacagctttaataactatttgactagtgtttgaggggaaccccatgttcaacaaaactctagaagcatgcaagttaattaccttgtacacgaatatatatatatatatatatatatatatatatatatatatatatatatatatatatatatatatattaatattactattattaattactagcttactaccttcaattccgcattttctttggttccattgtctgtcaaagcttatgagaatttgttgagcagaacaagttcagctgaaagacaaatttcttcgattaattaatgattggtaatatatcatatttatcttttttttctttttctatcttgtttttttttctgtttctatttttatcacatcatatatttagataccaacgtatatcatatttatctttttctctttctattttttttctttttttctttatctctcatcaatccacctcaaaatgtggtggatgtttaacattattcaattattttaaaaaattgcagctaaaacaattgctatcgtatcgggaattgaaatgggaataattaagatctgcaaattcctgatgagcatgcatttgtcaaattaaaaaacttgctatctttgtgccagtttaagtaattaattgtccaaaacattccccttaatttgaagttaggtcaaggaaaaccattttgtttataaagagtgtttatatgataaacttaagcgcatgcagctataactttggcggttaggctagattgcctttattaattaggaacggctatccatgtgaagaacagtaacattaaggttttaaattacctatagatgcctaataaagttttacatagcagtcgtagttacaattttatcacgatctttgacattgtgagaaattacgggcagatgcagtcataattgacattgtgaccccagaaaccatgcttgagtttctcaaagttaatgtcgtaaatactttctgcttcctgcttctcactgctgataaaaggctttaaatacacaaactgaagtctgaattaacacacaatggtcaaatatagctagcagccagttgttaaagtgcaagaagtttcttgaaaagaaaaatactaaatgtctagagtcccaaaggtcctatcagtgcaattagggtccattgggcttacagagagttgagaagtttggataatctaacttcaagctgtgagttttcattggtaattttcacattcgttcaaccttccttactctagaatctctctgacttttttttgttttttttaccatatactcgatctgaaatttctgcttaattaaatctttgtttttatgaaaatttgtttaagggtgttaattaaaaggattaagccatatatagtttaacatatactggtatacaaattatagacagactgcttagatttattaaagaaaaaaaaagaaacttaaagtctaatattataatattatcaaacggctgtaagttaattacttgggctgaacttgctattatattaccattaaaaaaatactagcaacacccactctagtacactattttgaacatactctttatttgttaagagtctcactcatgattttgtggtttaatatagctagtattactatgttaaaaggaaaagtttgtagttcaactgttcaaggttaactaagcttatttttatgcagctaaaacaggtttggaatttcaaatagataacaacagtactaaaaattctaaaacaaaggatatatagtaaatgcatgtataattaacaacttaataacacattctactatccaattatcattgttttataaatttaatcattcatttttttatttgtatattttaccattatgttttcaatttccatgccttttaaatacaagttttttttcccatttgatttttttttttaatttcgcacattttaccattacgttaataaaaaaaataacaccattttttttcttttttagggacacaccaacatcaataaaatgcacgaaaattaaagatacatgatataataaaatgtgtaaaagctaactttgattgtaaaacatgaaatgatgataattgatgaatagtaaaatgtgtaatatattaagcctaaattgattaaattgagactcacttattaacttgagtatgtcaacatcaattctatctccttaatttttttaaaaatttattttttatgtgctgaattaggttactgctatatatattagcatttgattccactaattaaattgaataagattatagttaatttaaagagaattatatttgttatatgagatactataattttaaagagtatattatgtatcttccttaattaactactcttattaaccttttcaatactttatacacaaaatattactctagcatgtggttgtttgggattcttcaaccgatgtaaatcccatcgatgtagtaagtcaggattttttaaatggcttataaaataatcaatgttaaatgttctcctcagacctgcttcaacaatcaaatcttagtactcaatgagacccacatactcctctaatctcacaccaaatttggagcacattccacagatccagccacagccactacactatccatcatcatgaacctagacgaaagaacggattcattgtgactatatatgtgggtttcgaatatatagcattttcgtaccaatatgcattgtgcggtttcggaattaacattcttttttctctttcctttgctttcttatcctgattttctttttggataccattttcgctttataccatccgtatggagcttttgttcccagctttcaggaattgatgccatgcaaggaccatatctagattttggaaagcaccatttagattttacagctaaaagaaatttcgccaagttgatcagtgacaaaacaatccagtcttatattcccttttgctgacaacttaactctgaatgaattaaaatcttataacaagaagttgctactaattgatttatataaaaataagaacatcagttatatatttttttatcagtagaacagcagttatatatatttttgaaaaaataaaataaaatatttacgataactaatataattcattgctctaaatactaaagtatataataaatggttctttttctgtcttttgtgatattaagggttttttttttgtaaaaatatgataattattgtattctataatataagtaaacaatgaacacaactcaaataattaatatttcatagttaacatcatggtactcccacgtgataatcaaatttcagaactatagtgcaatcagcattaattagaaacaacttaaccacaccttcataagctttatgactccggcatatggacatgtagaatatttggagagctttcggcccgctacgccacattaaagtattctccattattctttatctgaccctagactatgaccaggttcagctacagttacatcaacactaacatcgtaatttttagcttcagtggtcctccttcatgtggtaccacaccatcatgtgaaggaacattacaagtttttcctataaatggtaggactcatctctagggccacgttgtcattcaaacacaaaaaacatgcaaatgaggaatgaaaaaagtcagctatatcccctagagttcctctgatcacttcattgagtttgcttgtggcttcaaagaattatcaaaattctcaaagcatgcatgcaacactgaagtgttttgggaaactccgggtgccaactgacattgtctctctgtatatataagtatgagtttaaggttcttttcttctttttcttttatctcctcattaattgagttgggctattgaaactaacattcctagtatgagtttgcttgtaactaacattcctagttagttactctattactactctcaacaggtagaatcaaccatagtattttaaatattattacatatttttaaataaaggatgtgctaaaaaaaacacatttaaattaagataaaagctaaaaataaaaattatggaaataaactatttaaattaagacatgtcatatttattaatgagaaaaaggattatgtactgactcagttatctgatcacaatttttcatatataataaattttttatttttaaaataattattttaaaacttttttacattaaaaaaaaattaaattgagattgattaatattatcgggcaaatttttaaaatgttagtaacatgcacgatatattatatttctcaaatgtcatcttaaaatgttatcggagaaaattttctctaattttattttcctcattagtaatttatactccataaaacatgagatggggtgtgtaacagcgctagtgtgtcatttggctagcaaagcaaccaatttgaaacatgtaactttatgtgagtttccgttcttggtcattctcagagattaattcttatgttccattaattatttcaatttggtcaaaataaaagctactgagatttcttaaatatagatatagcaacataaacgggcagaagaaggaaaaagaaagaaagaacgattttatttcctttccaaatgcataaacaattgcttcatcaaaggttataaaaccaaacccttgaatatttcgatcagcttcatatcacagtaaaaaaatgaaccaggaataatctagcaaataattaggtcagcagcaaaatgcatgacagttccaaaccacgatcacccttaccagtgtgattccaggagttcccgcggccaaacacttcaatatatacggaaaaatagaaaatgagtccgtcgtgaaatgttcaagaaattaactctatggaacacctagagtagatcgatgcttacatttctgattctttacttggttattgttggcacattggtatattatgcatgacaacgaaaggttcacgtgtcaattaaatatactatacatatatgacgacttcaattagttatttgctgctctgactgtgttttataagaaaaatataatattattacatagtgaacatggactaaaaggtgggctatggtggataatgaagatgacaagaccagtaccaaagtcaaacagattttgctttttctttacttctaaatttaataggataatatatagacgcatgcacatctaaaaactttttatattattattcaactatacatttatatatgaattaaaattactgtttttttataattactttaaaattatattaaaacaatttctaattaattgataatattttactattgttatatcaaaattagactcttttctccttcccttcatattcagcttctttttgagacaaaagaataaaccccttttcttaaaagaatctggtatatatacacacagaaaaaagcttcagaattccatggccctgttgaatatttctccctagtccctactcatgagccagagaaaatgcaacataaacatggacctcacttttccttgggcatctttccacaacggtaagctaaagcaatattaatgtattcatttaattatcagtgaataatatgtcaaaaagcaatgataaggacattgcaatcactaaatatacttctcccttgacaacaaaatccgactaggttcatgttgacaataatttctttaattttttttaatttatgaattatatgctagaatttttctcagtcagtgactgctccccaaccgaaaggccattgtgactacacatagaaggtgaagctagcaacgaatttacatctcactataaataagaatgtttttagtaacagtttattgccagcttgcaaagaatgctagcaaattcaagaattaaaggaaggtcagttgtccccttgaatttccctgaacacttcattagcaattccttaggtttcactgacaccagtgaggccctatagttagccatattgaagtgtttgggggaactctaggagccatttgatgctttttaacagaaagggtgttattagttaatatgatcggttttttcaagtttgcagtgtagttttcttatcaagtgcatgtcttgtactagtatttcagtttgcatcattattgttctctattttatttttagttttctcttgccatgctagctttcatttaatcaaaagctttcattgtgttggaatagtattgaatgaaatatttaaggatgcgagagattaaaaagttttgaaaaaagagactacttgaataattgatcacttcttgtttttgacttgattcaaattcttatttatattaatgactcctcctaaatcaatgattaaaatttcaccaacacaaacttaatttaatggttataaatgattctccaaaattttttcaaaaatacaaacctactcacctgttctagaatattttatatgccactctagaattatcttctaaaatagtagatttttgtacagcatgcttctagaatttggactaaacatgtttctagaaattgggcttttatttaattagaccaaaaaaatccaaaatcggagtttatattttcaacatgttctttaattgtgtctagtctacaagttggctgtggtcttgatcgagtgcaggtttgctggtatatttagaaatggtgaatggtttttgaaaaatgaaagcattggaagaagcttatgatgagcaaattgagcaccctcttgacctttcattgcccattttaataaagaactaagatataatctacttctacactaaaaaataaagaatagcaatttcctctctctctctctctctcacacacacatatatatatatatatacaccagcaacggtatatcataaaaactaactttcagaattaaatcatgtgattgatttacagatactacatgagactgggggtacacattttaattaaattcccaggatcagctatcccaaattggtttaattacagatgtaggggtccatcccttcctaacaagttcacatcaattactctatgtgttattggagtttttggtaggtttcttaaatgtaagttgggccggatcttaactgccatactacatatgtcccagaaattactttatttactgctacaaaatattcaatttggacaaattatacaattctgtctgatctgctgctcaaatttgaaagattacacattgagaatgaatggcacagaactgagatttcatttgaagatgatcgaggaataaccgatattgaatggaccggagtacatgtacaggaacataaaacaaacatggcagatattccatttctcacaatgtcaatgatcataatgaaactgcgacagtaatttaaaaccttagcttggctggatcatgatgtgagggaattatcaatacattttaagctacttctacatttaatgtagaccctacatacagcatagccatccgtttcctttacttacaccaagcaaagtctcaacttgaaagctctgtcagttcctcagtttctatctaattttctctgttgttgcaagtcaaatgcatgctatttttttatgacaaaaagtttaaatgagttggattcaggggctcatcagagacagaacagatctcaagtttaaagagcacttacagaagtatttatagatgactcaccaacaaaatcttcacattaatatatgagaatcgaattcatatccttttagaatataggtctctttcttatcaactggatcaatttttgttcgttaatgcatgctagtgtttaatcattgaattgttcattttttttttaatgttgtgtgggtgtggaatgtgcccatttagctgaaaatcctgcaataacatctttataagatcactctttgaaagtggagaggtgctagactttaaatgcttagtgatcctctgtagaatattgttttgcggtttgtcaattgatttttctaacaagtggtatctaaacagtaaggagagtgtctacacaaagaaaaggatacagcaaggtatcattgctgtccggggtgttggttagaagaaaaactatactcacaaaaatagtactatttacaaaaggttaaattgctaaattgtatatcaatttatgtgaattttattcattaaatacagatataatattgtaaaagatagtaatatagtcggtgcagttgtccataggatttatcatttcataatgttcacccatccatcaccaaaatgtttttaaaatcaaaccaataattgaaccagtaaacccaccagtgtaagagttaacagtctaactgttgttcaactagtaacaattaaataatattattttaattttcaacataatatataaagaaaaattaaataaaaaataatatgatatttattaattcataatttaaaattaaatttaacttataaattatcatcactcgactcatatttcataaatttgttccttatattcaagtctaattttttatggcacatttcacataactatgacatgatatgttagtaatagttcatggttgactgtgggtggtggttcacaaatggtgttttccccctattgttaatgatattatcattgttttgattccaaatgttgatgatccacaaggtatgaaagattacagacctatctccttgtgtaatgtgatctataaaattttgtctaaagtgatagctaatagactaaagaaggtcatggaaaaattgtgtatctgaagaacaatcagtttttgttcctggtagatatattattgataatgctccagttgcttctgaaaatttgcattttatgaattgcaaaagaaggaaaaaaaaaggagatgtagcattgaaaattgatattagtaaagcatgactgaggttatttgcatgagatgctcatttaagttggcttcatacagactttgctaaatggataatgttttgtgtttctttagtgaaattctatgttaatgtcaatgatgaaatgattgggcatattactccacaaagggacctgtgtcaggggatcctctctgcccctacatttttatactgtgtgttgaagaattatttatgctaataaaagatgttgaaaagaaggctaaggtgcatgaggttaaaatttgtatggatgctcttgttgtttctcacttagtatttgcagatgatagtgttttattttttagagatgatgagagagaagttgtggtggttagaaaaattttgtatgactatgcagaggcatctgggcaatatattaatcaacaaaaatttgaagtcacttttagtaggaatgtgaatcaaggtttgaagaatgatgtgaggatgactgaaggaaatggcggagggaaatatctgggcttcctttcttttgtgggaatgagcaagaaggctatttttaacttcatcaagaataaggtgtgaaaaaaaatataattcttggagttagaggaaccgatcaacgacgacggaaagatatgtaacggtgaaatatgttcttcaaactcctaattattgcatgagattttttcttatacctacaactcttggtgatgagattcagaggatgatgaactcatattggtgggatcaagtagtagggaatcaaattggttagcttgagacaaattatgtgtctcaaaggagtttaggggcttaggttttcaaaatatctatgctttcaacttggtcatgttaggaaaacaagggtgaagatttatatcaaaatacaatgctttgttagcaagagtattcaaagccaaatacttccctaaaagggattttatgggtgttgacttagctaataactcatcatatttttagtgaagcatattgtcttccaaaacggtgttgaaggaaagtgtggggtggaagctaggaaatgggaagaatgttaatgtttggggagaaccgtggttaaggcacaagggtcatgcaataatttgaacaccacctacaaatggcttggaggatttgaaagtgggagttttgatggataaagaggctttgtgttggaactacacactccttacacaaatttttgaagtgcaggatgttgaggccatcttgagaacaccattattgaatgttgatcaacaagacaccaagatatgagattatacaccgaatggagtctactcagtaaagagtgcatacaaagtgataatgaatgagctagtggataatgaacacctagcaatatctagtaattggagattgatttggaaagtgaatgttcctccatgagtaagaaatttgatgtggaaaatatgtgaaggcaacattccaactagaacaaccttaaattctagaggggtgttgtgtctaattgtttgtttgctatgtgaagttgaagtttagacaattgttctcggtttttttttatgtgcacaaaaaataaagattgttggtcgaaactcaacctaagtcattgtttggaggaagtcttgttacaaatagaattatgtaaggaattttttttcaccttgtttttgaaatggtaagaagaaagaaaggatcaaatggttatcttgctatggagcatatagaggaggaggaataacaaggccctgaaaaacaaggatgtcctaagtgagtttgtggttagaagaagggagaagttttaccaaagttggaagtgtgcaaagacaaaaaaattagtaagggagaattgacattcgaaactacatcattaaaggctgatgaaaactagaacatggatgattcaaatgcaacgtggattctagcttccatatgattttattacattattttggcttaattttattattttgaagactaaaatgatgccaattttcagttttaatttctgcagaattttctggttatgttttatgtaaagaaaaaaaaaacaattttcccttaaccctttttatcttgaaattataaattctttcaaacatgaccaaataaaattattaatgattaacattatgaaatgaacttaaaatggctgaaattatagtttacccttctttttttttattaaatttcacaaatgtatttatacatagcttattttaatttcaaaattctcgagaaattcccatcctaattttaaattttgtttaccataaattaatttttatcatgatcataatattaattttgagaagtaaaaacactattttaccctttttaatttaattatgaattgattctttccgggagaaattattagcaccacatcatttatgatcccaaccaaaatactcattttacatgtggataatcaaaggaactcactaaatataaaataatctaaagcttacggtgttaacaaaagagagcatctcacatttaagtagatcaatacataaaaataataaattaaaattaaaaaaacaaagagactttaggccatgaacgattttcttttgttaacgatttgacaagggcaccaaatgtccaagtaataagattcggacgtccgagtgtcgaattccaaaggaattttgtgttttactttttattgtatacttttcaatttataagagaataaataattaaagagaggtgtagaagaaagaacagtaaacaataacatgaaattataaatagtagagagcaaagaagtagggaattcgatggaatgtgaatgttaggacctaacatgccttatttgtctaggatgtatgatttttggatttttctttatcaatttaggtgaatttatcatacccacatttattcaattacttgtctctaatgcctcacgatgacaagcatattttatctatctatctccaaaatgcctttgcaaatagtcaatagataaaaagcatgaagccttgattctagatgtgtgcttgaatgcatgggcataaagttatcatcctatgtctagtaatgattttcttatgatatcttttctttttgttctattagaagttatcctctgtcgagcgtctaacccctaaaactaatagatgcatatcttctttatatttttattaagagttaccctctatcgagcacttaccctctaaaattatgtaaatatgaataatgcatggaatataaatagaaaagaaataggatagaaaacacatgttgcattgataaataggggatacatcatacatcactttgacttgttaggcctgacaggccctaaccaggggtttagtctctcatgcccattgaggaccttacactgaaattggagtataagaattgatggaagaggagggatggaagaaggcaatagaaaaaatggtgaaagaaagaagagaattccctaaggaagagttctcaggctttgggtattagtgagagtgctttgagactcggtgtgtcattttcccctgcttgactctctttttatagctgttgaaatagacttgggccttcgtacatgcgcttagcgcgctcttctcgcgggtgctcgtttccccacttagtgcgtgttgcgcttagcgccagtgcccttagcacaggcagagcgcgctgagcgtgcctttggactggcctggtgctgaagcttcatcttttttcataattcttctattttttgcttttgtttcctctagtttttatatttgcagtcaaaatttgaaaaaacatcaacttttaacaattagacacaaatatgctaaataattatttttaaatacaattttgctttatttttctttatcaacagtacaattatttagcaattatcacctttgttccaaaggatttggctcccatgaaactctattaaaaaaaagaagaaattctttttacttttagaagctattcattttcagagagtttatttttagagcattgcaaaaattctctcccaataaaactgatctatttgcctctgttttgtggactatttggaagtggcgtaatgaaaatatttgggaaaatttgaagaggccaattccagtttggtcctcccagcatatttctgactggcagaacatgaagatttcgagcatcacatcatcgtgctgcatggataccaccgcaagtagactttgtcagtgtaatattgatgctgcagtttttcaggatcatctacaacatgaaatgcatcatttatcttttttaaaaaatattaatccattgcaattatatcctacatatatgcttcgactccgaggagcccaacttaatattatgtcacatctaataattgcgtcacatttttttaaactaaaaggactagagttgtttaacttaaaaaattggagacttgattgaaggaaaaataaaaatcattgacaaattaaatagattcaaagaaaatgtaacagaaaaaaaatactcttctcgaaatcaaactttcaactttttttctcatctttcatattctttctaagtgaatttttaagagaaataactgacatcaaattgttactcatcaactcttttttattttagtttccagcaaaggcaacttccctagatccttacaagtgtgcatgatgtggctaaatctaaaacccgtttattagagcagtttcttaaccatgtgtttttaaattaaattatgtttctaaaaaaatagtaaaaacttatcaacaaaaaaaaaaacaatttcgctacttttctgataaattaaaaataactactgaaaaaaaaacaattaatattagtcattaattgttagatttttttgctagcggagaaaatcgaatctacaatttttacctccctcccttctctttttaagaccaaaccaaccatataaatgtgactacaaattcttccgattgctcataatgcctctgatatttctgaaattcgaaatgaagaaatttctcaacttttgaaaatgacactgtttgaacaatttctttagcaatacatcacatgagcttagaaaaagaagcacataagcttagatccttaatatatacccaccaaagtactcctattagaagaaatttgatatcatatccctttctgtatccatgaccataaatagtagtaatgaaaatgaaaattaaagaaatttgatatcatatccctttctgtatccatgaccataaatagtctctgcatgttttttactattcaagtttttaccttcttcaagtatccttgcctcgaaaaataaggtagaatcaccttctccactgaggttggatcaacttctctgaaattgataatatccacataacagtgattaagggaatcagaaaagggcaaaataaaaatcagagtacaccaccaatatttaatacgtgtgaaaattcgacatacctactacttgatttaagtaaaaaagaaacataagtgattttaatgaagatcatgtcactaataacttattttaagtgaattctttatgcccattaaattaaatgtgtttctaatgtgctttcaagaaaattatgggtttttatgaaaatgtaagccaaattaccaaaattctaatagagacctttaaacctcatattattttgattgtaacttttgctacaaacctcagattgagctaattttgaagtctatggaaagataagaaaaattcctacatcttatatgcagacacctgaggctagttcatggttaagtaggggggaaaagttaaatgcatggtgtctagagaagtagccaaagggaagaggaagctagagatgttggagatatccagagtaatttctcaaaaattgactcttaatgtatcctccatctagtaaattgtttttgtgttttcattcctatgagagtattacgaatagtgaaattcctgctttgcaaggtgaaaatgaaaatgaaacttggattggaaaaaccttttgttaatagaaaagaaagaaagaaaactatagatttcaaacatgcaagtgagcattagtagtctagcaaagtcttgtagtagtcagtcatccataagaacagcaacttttttcctcaccacaaaacatgcaagcaaataatttaagcatgtatttatgtagatggatacttgtctctatgcatgttcactgtattgtattccaaaagcatgcctaccataatcaatttcgttttatttttgatggtgggaccaaagcatcaaccaatcaataaaccaaagcatcaatcaattaattaaaaaatacaacaaaaataaagcaaaatcttaaatgcttaccagtcccatcccttgaagatgacagagatctatcagaccttatccctcctctactgcttacgcctatcagcttttcagctctcggggaaaatgaacctgacttgccattaagtgaggatgaaagtgaatgccgcctggttgcactgtttttgtctaccaaatcagtagtaaatcttggagagccttgtcctcttagcctagcttttgcagattcagtaggagccatgtaactgggcagtcttggagtaacaggagtgttatataactcattctcttgttcattaatgttagcaggtagtgaagctcttctttggctattgttactgatacaattgtcaccaccattcaaattctcactgactacttgaattccttcatttccacccttcttcacacttgtctttgagacagcaatgggatcattatgtggctcattatcattcttgtcttttgtttgctgtccatgacctttctcaggatcagactcttttgactttggcacagtcgaatctttctctttcgctgaagaggcatttgggccctgctctgaaacatcaatgacagcatgatccaaaatctttttattgccggattttcttttttcattaacaacctcagatccatttgaagcattatgcgcatgagtctttccaaaactacttttctcagtttcttttggtgggttttcctgagctgaaggcaatgggtggcttgaatcctttttcagatgctgtttagatttgttagaacctaaatttgagacattgtcagctttcacagtaggagatttccgagtaatttttttaacttgccccttttgaactgtctgagaagtgccatttttctcatcagacactgactcaagtttctttttaaattcaggaagagatgcccaaaagtgggaccttgtccaatagtcaagccacttctgacccatgttaggttctccaggatcactgttgagtgatagaggaactgcatatggggatgaagccagaagctaaaatggataacatacgtaatgagctttaatcaaaaccaaaataatatgatgagataacttagtttcaaaacaataagaattgaaaaggaatgataagaataaaaagtacaccatttgttcacaacctttgtcatatcattcatattcaaaaatcatatcaataaaagagtgtgtaaagtaaaaatggtaattgacccaaaaatttgctaaatcaacttacaaacaatgctcatgagattcactgattcagtgaccaaaaataacttgttatcattgtcattcaacattaataattactggaaccatcattgaacattaacatcattctccacaatgcatggcaaagacaaccagattgagaaaaaaatcagatattacaggatggagaaacttcagatgaagcatacagttaatataatgtggagtaaaacaagaccacaaccctagaaatataaccaaaacaagttgaaaacattaatatcatagcacatagaactagagagagtttatgagcccaaaagttgagacaaatttatcctttctaaaggcaacaagtacctactactggtaaccaaaaaaatagctccagattaggagaaagaaaaacgcaccaagctcacacataatcaggggaagaaatcttcatggacaataacattttaagctgataatgtctagtagtttcaattaactggaatgagtcatatttcagatactagaagtagctataagaatctatttatcctctatgtaggcatgatatagcagtttcttaccttgcaaacaaagacattttcagacaacttctctgcctgtgtggacgaaactacccgaacagaatttgagcaatgagtatcctgataaaaacatgttgaaaaaaggagttagttaagtaatagaagggcaagcagaatgcaattgaaggcattcatcttttccttcaccacattgaataagatccacaaatcactagagcgggacaactgtatggtagaaaacacctcttgatcctaatttaatgagaaacatttccacccgaaaggcagggaaaataatgcacagaacactgaactgttgaattaattaaagaacttttaccttacgaattttctggactgcaagcccaatatcagagcatctaacattgtaaccacgagccaatgcttgaaatttaactattcccttcacacaatataatgcagaaacagcgtgtcttctaaccaagtggccacgaataaaagcttgcagttgtatgacacctttgagtttttgcaatgttcgacgagccttcaatgaagttatgcaggaatcactttatgaatttattaacataaataaagaaacttcccaatgcagaactgatggttaggaaacttgcatgcgatagcatacaaattaagaatcaatgggtacagagagaatttcaaataaaaaagcagggtagacaaggcactaactataaataaaatacttatattttttctttcctctacaaccaaaaatttgaaatattaaaagtgaaataactgtggttgcattttcatctgtaagtatttctactgcatttatatatggaatgccaatgaagcctttcagataattataacttaggcacatcagttagtataacaaaattgtataattacaagggacttattaccagataacttctacaagcagcctgaacttttatagttgcttccgtaagctggagtttctcaagattctcttgagatccaaaattagcaacatcttgcaccttagcttctttgactctagttgaaagaacatccctatcatgtgatgacctactaactacctccttttcggaaaacactcctttataatcattagctccagatattggtgtggatatctgcaacgaatccatggttggatcaggcacgggtacctcagacgacaccagcaaatccttgtcaattgaaggtttctttacacacaaaatgaaataaaaattagaacatgcatatttcaaaagactaagcactcacagacacagattataggcaacaacaatgagactttctcccttccatagtttcttttataacaaatcataaacacaaacgaatgccaaccacaaaaatacttacaaaaatgtcattcttctttgatgaagtagactttgaagacgatttcttccccaagagtaaattcttgaaccatttcccaggacttcttcctttccccatttcaatgctttagaaaccacagaactcgagcatcaaaatctgcaagaagcatatacaacagaccctcaattccagcttaattaaatgtcaaactaaattaaattcactagccataaattttaaatttgaaaaagacattaataccctaacataaatgcatttttcaagtataattaataactgaaacatgagttagcagttatgtacagaaaaaaaaaataccataaagtaaatgaaaaatccaaaaccaaaccgtgcaggctattttcaaaaaaagacaagaactaaaactagaagtcaaaacaaacaaaagctgcaattaattctacacagcaccaaccatgagtcaattcaagtctttccttaagaacagcattaaaatcagcaaaacccatctcaaaaataagaaaaagcaataaattttatcttaaaaaaaaaaagatcaacccaatgaagccaagttaaaacacaatacaacagattcagatcaacaacacacaaaagcaagggaagagaaagagggtcacaccaacaaatagaaccctaagcccccaatgtgaagaaatgggtgaatgttatgaagattgagatttgggagagaaagaagaagggatttgaaaggttcttcaataaagtgaaggtgaggtttggatcaaagttgccgtttttatatttggttgaagagtgagggaacagtgagaagctgaaaggacatagaaggaagagaaagtatggctgaagctgaaaagaaaagcaacaacgtcatagattcctcttacgaggtttaaattttgaataaagaaaaatagatcctagtaattttcttaaaaacaaaagttaacaaattaccgattgatatttgataatctataactataactttaatgtatatgcacttctcgtagtatttgacaatgataatcggataatgccttttttttatgtttcttcccaatatttatcttctaagtaaaaaaaaaacataataattgtgcctaactgcctatggcacatgatattttgtcttattgagttaagtattatatatatggatccatgttgaaaccgagatggaaaaataatgttttaacaactttggttagtttgtgttctattttaaaattgtactttaggtgcatagtaacaaaacattttttggataatatattcacattatcattaaaatatcgaacactgttattaaaataattttatgagtagtgttatgtaacaaccatttctcttgttttatctttagttatagttataatatgataagaaaaacaatatatttaaaccggattagattggttggcaattcgtaaactaatttcattaatgtgctagtaaaatttaatgactttcgtgtttcgagtgataagatctttggcggctgttgtggacattagagtttgaggatgggttaatagcaaaggtgggtcatacgggttggatctatttaaagttattggcccacaattttaataggttgggctggtgttttattttgtttttatgcctgttttgcaaaatttgtagtaaaaacttaaatgtgtcggcttgtaaattaaagataaaaaaatatgaagaaaatattaaaattaaataaaaattggaaataaaagaaattaaagaaagctagataagaattatttttttatattcataaaaaattgtattttccttctacagtttgttattaatagtaattcattagatttcataatatgtatttataataatgaaatgcaaacaaaataactataaaaaagtctcagttaaatactaaatatatactaataaataaaatctaaccacatatttgagcctatcaatcaatatttaagcaaataattaacaaaaatcaacctattcaaacattttaacaaaaaataatattttaataataattaaaaataattgagggtctacccataattgacataccagcctattaaactcgcaaggtaaagatatggaattgaaaagaaaaaaaaaaaaaaaaggcaattatatgggttacatattacgggtaacaaggtgagccagtccatcacattttgacttgttcggtccctagcttgccaaaaataagacatgatagtttaagctacttattcttgatgggttgaaagtcttggaatgtcccatttagcgtgaattggctaatcaactggctaaaaaaagaaagtttaagtttcataattcacaacactaacttaaattggtatatttaattaaagtgcccaaattgtattagtaacttagcctaaacttaaatattaatattcttactagaggaattgattttataaaataaattaacaataataataattaataaatatataattttttaaatttattgaatgccaatattagattactggctagagaggaatattaatacactctcgttaattaacttaaatttatttattgattaaaatatattaaaaattataaaatcacagtaaaacttattaaaagggaagtgaaacttatttaattttactatttcaaataaaatttttagttttggtcaaacaatactgaatgtatttgaaagaatatgttattatcaagataatcactctatgtatggaggctgtgggaaattaattattggttgtggccttattctgcgcaaataaaaattgagatggaagtcatagaaagttgacaaaatctcgtgtccataaataatgacataaaagaccgtactagaattgccatactgaacttcaatattttatggcagcttgttgttgtactgatatatatatatgctgcaaccagtaatgtgtcaaaatttcaggtttagtttcttatgctggaaacatcaagaagaggattaggtgtaactaattcaaagcacattaaagaatgtgtcaaggtaataatgtgtggcaagtagcaaccgagacttttaacaccttgccgacacaaatccacaatcagtaaatttcaaaactcaaaattgcaacaatcttgtatcgtatccaattttcatactcgtaaaacataactttcccgtgatttacaatgtaatgctaaattgttatgtgatattgtgatactcgtgcgtggcttcatgcggtgacatgaataatttctttttttagaaactaaaaattgggtcaatattataacatactatagggtataggcaggtccacaataacatgccaacaccaaagtacaaatctgcgttgaactgttgaatttagcattgtggaaaatggtgcttcatggggccacgtggcagcgtataaaaccggttgctaatcaagattatgtagtctgcgtagcatctgatcaggattcttgacttatactctttgatcaacaactttggtggcttcagttacatgtaatcataaaatctcactcttttttagaatcccagattctctttacaaagtttctagtttctaactgctccacgtttatggaaactttttatcctcatatcatgcaaacaagattttttcttggaagcgatatgcaatgaaaatgaacttctctgcttctgcttattagcttttctgtgtaattaagttattacattatgctgcagcagcagcaataataataataatgagaaaaatgtaagtagcatcacattatctaacatactttttttatcactgaatgaaatttattaaaaattataaaaaaaaattctttatattttttatcattgaatgaaatttattaaaaattatcaaaaaaaagatttttctttatatttgatgagtcttatagttttgtaagttttaataaattttaaatgataataagaaatgcattagaaaataaaaataaatgttttcaaaagtatgttgttgactgtaataataatagtagtagaagtcaagaattttgcagaacattaatattttgagcaataactgcttctgttacagttaagcttcttggtggcatagtatttcaattctttagcttcaaaactgcaatatatagttatacactgttctttctgagactcactcactatcctctgtcttactatactacacaggtgtcaatttcaccatcagaaaatgaagaatttcttggtttctttgtactacttgtttcctgcaatcattgcaattattcttgtgctgctcactccaattccaagtgcacagctaacaacaagtgagaacagaatccttctccaagttcagaagcttcttgaatatcctcaagctcttcaaggatggaccaacttgaccaatttttgctctctccctcctcccctcagcattgtgtgcttcaatggccatgtaaccgagttaaccgtcgttggcaattcatcttggactctctcagaaagattctccattgagtctttctttactgtcttgacaaagctctcaaatatgaaggtgttgtcattggtgtcacttggtttgtggggtcccttgccttccaagattgacaggttctggtcccttgaagtgatgaactttagctcaaacttcatttatggggaaatttcaccatcagtttcctctttgaagaatctaaaaagtcttgttttggctaataatcttttcaatgggagtgtgcctgatcttggaaaactagcttctcttgaagagctcaatttgagtggcaacaaattaggccctgagttcccttcattgagcaagaatcttgtgagggttatcttgagaaacaactcattgagatgtagaatccctcctcaactcattcatgtttataaacttgagctgtttgatatctcttccaatgtgatatttggaaatatcccatcatttattttctctcttccttccctaaagtacctaaacttggcttcaaaccaattaagtggctacctttctttgaatgtgtcatgtagttcttctctcacatttgttgatatctcacacaacctcttggtgggaacattgccatcttgtatcggttcaaatgcttcaaaccgaacaacactttattatgggaattgtttggtaaccagaagcttattaagtgaccaatatccatcttcttattgccagaaagtggagtccttagcagctgtcaagccatcaattaaaagccagaagagggaaccagagatggaactaggccaaattattggtattgttggaggtgttgtgggaattgcagggcttatggttcttctcatttggtgcatcttcagaaagtctaaactagaaaaagcagacagtaattatagcataggcatctctgctccaaataatttttccatccgtgcatattcaagaccaaatattaatgcaagtaaggacattattattataattgttgttataatttacattctcatctctagaggtaagttgacactacactgcatttctctccgtgtgaaattaatatgtatttcacttcgatccatatttatataaatgaacttgttagggacattttttcctttatgtgattgttgatgttattgacatttgacaactagtttttcatccctattatcaattttgaaactagagaatataaatgaagtcttttttagtaaagtttccaagtcgacaataaaggaattttgaaacttcatttcctaaagttctaaaatcaataatgagtatctaaaattagttgtcattttataattatttatcactactaagacatttgtttacattcaaatagattaaaatgtagtacatttcatttctcaaaaagagagagtaatctttaaaattagagactatatacttgaaacatctattaggggactggaatgcaatttatttatctattattctatttgaatacaatggtatgatacaaaaggcttggttgctgttgtatgatgatatgataaatcgtgcacatgttcaattcagatcataattttcgttcctcttgtggtggtttacatatttctagtcctttatttaactcatgcacgaattgttaatttttcccctatggaaataggacgtcctcctctaccaatgaggcaacctgttcttggattcccaccatactgcattttctcaatagaagaaattgaagatgctacaaacaactttgacccatcaaatcttatagcagaaggatcacaggaacaggtaaaagaattttttttttttgttcaatagtttcataatgataatctctacaagaccaagtggtaatggcctatactcttgcttgcatttgcacagctatataaaggttggctcatagatggttcaatggttatggtcaatcgcaataaactaaagcagaaaagtttgcacaaaaacagtattcagagcttgaaggtattaccctatttaaggcacaggcatttggtgagtgttctaggacactgtgtcattactcatcatgaccatccccaaatgataagcacaatattcattgtattcgaacatgtctcaaacgtgtccttgagggattaccttgcaggtaaacaaaaacattaacacagaattaattgcaaaggcaaattaacacttgtatgaccaaaagatgtaacatggaaattccatgtaacacagataggagaaaaagggaaatgctgaaatggccacaaagaatggcaatcagcataggcattgcaagaggaatccagttcttacacactagagttcatcctggcatatttggcaacaatataaagattgagaatattctgttggatgattgcctcaatgcaaaagttagcggatacagcattccatggccatccaaggttagagttagaaaagaatatgtgtaaatttgactagttctcggtaatatttgcattcaatcaaagtatctaactttaatgaaatctgcctttgtcgatttttagaaaggtcatgacagcaaactttatgatcaaagagcactcaatcaaattggcaggtatttctcagttcaatctatatctttcttccactgatgcatccaaactataacatgttgtccccatatgcagcattaatgatgcagaaaaggaagacatctatcagtttggtgttattctacttgaagttatcactggcaaactaattacatcttccagtgaagtagaggagctgaagaatgatgtatgcatgagcatgacattttattcttagccagatatgtactattagatttgtttttcctatctctaatgtcctctttgtcttgttcagcttgagagaggtttagcagaagcttcatcaccatctctaaagggtgcaacaccatcactaaagggtacatcaccgatactaaagggcatgtctgattcttccctccgggatacttgtgtgcatgaatcattgaagactacagttcagatcaccatcagttgtctcagcaaggtttcaagtaaccgcccttcaatagaggatattctctggaatttgcagtactccatgcaagttcaagagccaaggaccagtggtgtacatttctttacagatatgtaaacttgctgtaacaaaatggtttgctgattttcagagttcttaagtatttaatcataaagaataagggctagtttgattcactcctcactttttgttttaaaaagttgttttttaaaataattctacagtacttggtaatctcatccacatcatattttaaaatatggacaacatgacatgattcagtttggttaaagacaaaagtttcagagatgttatttaccatgaggaaacaaacaaattttataaaacagaaaactatttttgaaaacagtgaacaaacaaagcctaaaatggaattgtaaatatataatttcttaaaactggccaaaatttttcaataattatttaagtacctatctaatttttattgaggttcctaccaagcaatcccttgttcccctctttgaaccttccgggggataacttttgtttggatcataggtccaacataggctgataatgtagttatcgtatgttacagtgatgaaacaaaatgacaagtattgaacaaaacatgattctgcacaacatagagatcataaggcagaacatccattcatataagtttgaacaaacacattgtcaagtgttacaaaacacaatcagatcttttaactacttgtatggttttcaatcagatccaaaaaactgttacgctgtcaacacattctaattacattcaaaaacaaaaaggaaaaacactagccacacaaaaaaaggaaaggaacaaataatttattttaacaaataattaaataattaaattaaagatgagtttctaataatgacactcaatttctcaaacaattctgtgctaccggatgaagacattcaacaaatttttaagttgagaaggtagcaaagggctgtgtaactgcctgcagtcttgagaaaataattgcaagagtgatccctatctgttccattcattgtctgctccatatctggggttagtactattcacttgactatatacctctggctttatggagtttccaaaggcattccaacctagaaggtatggcatgatatactgcatagaaaagaagcataagtacaatcaaaatgagcaaaatattaatcatgttgagtgcacaagaaaattggaatcactaaaagaacaaaaaatgttgtagagcaacctgtttttaaatgctacatcactttattgaataaacataaccaggaactttcttttccaaattacaaattatttgtctgacagaaaagaaaaaactataaaccttgaagatttcatgccaagtaattttcttgactaaaaaactgagttactattacacagaattttacagcatgagaaagtttgatctcttcttctgtgcaatggaaaaagactcagatctattatgtaagcaagtaaggttgtattgtatctacccttgaatttcagtgggttaagatgcaatacactttaaattaaatcaggcatatacactctgacaaccttatcttgttgctactatatatattcccattgcattatcagagaatcatggcaatgaatattctaccattagaggggagagagagaccatacattgaaaagtgaccttaaaacttctagatctgcccttgtaacagggagaaagatgcttttctgaattccctccatgttcgcaggctttttcagaacccctttgaatattcacacaacaaagtcagcactttttttttacaggcaaattgaatcattttattaaaaaaaaactagcatggtcacaagttgtgatacaagctggctgcaacaaattacaaatgtgtaaaatgaagcaaaaaaaaaaaacaatacaaataagatctaagctttaatcaaaagcaagtaagactccaagaatttactccgttctccattctgctaaaacgtcaccaatgtagcaccacaaacaacatatgtgccataaattatatggtgtagctactatgcaaagaaacaaaaatgccataactctgcatgataccgtcatcaattatttcatcatactgcaacttcttatctagtaaaaattgctggtctgtttagatggcatttcaaaatatatgggccgaatactttccccacaaccatttatctatctccaaaaccacctgcaccccatctgttcaatgaaaacctctgaacacttacaataacacaccaactccaaactgctgtaaactttccagaaatgcaccttaaagaaaatttcatcatcagactttttcctaataataacaaaataaaagaacaaacttcaccctccacacactacacactccaataccaaaaaatacgatacctccttcaccatttcttttacacccaatctcaccaattactttttctgtggtctcttaactctgaatccctacatccacccagaaagaggatatgtcagactcccccttaaattgttccactggcatgaaaaatccttcacagcccccaccagctttaatatttatggcatttaatatttttcctttatattgcaggtattggaataacaatgggtaaggtaaactattccttaaagtgagtacatatcactgttaaaatattgcatcactaagcaatctatttgcagtttacaactgatttgtgaactgaatcaaaccggaagtacagagtatcctaacaacttcaagatggcaggaaaataaaatcaaattgataccaataacagcaacaaaagtttaagaataaagagaattacttaagctaaataagtggccagtagcatccagaagtggctccaccttcaaaacttttctaacatcaattttgctgctgcataaaaggacaatttccaaaatgatttaaaaggatgaaataataccaccattacttatggcataatatacacacatcccaaaaaaactcaacaagtacagtggatactgatttagttaattcacatgaatcaacatatatggtcatcgtacatgtttaatttgtttcatggtttgaagacaccatcagatacccttctcatgtgaaaagaaaatccaatttgtatcacaagataaagcaagcaataatcataaatttgtcaatatgttgatatgttggattgttcattaacaattactagaagatacagcacagaaactaccttttcaacttaacagtctcatgagaaaattcccaagaatcccttgcaccaaggataattagagttcccatttcactcactgatagtgagaatgtctgcattcaagcaaagtggacaattacctcacgttttaaactataagactatgttcaacagaatcataaattccaacaaaatcacatttgtttttctttttggttcaaggtagggcccatcactgatgggccttgggggaagcccacaagaggtcccatgagaagaaggggagagagaaatggaggcagagggtattgcaaggtttgaaattgaacctgcacagtccttgcgtatctcatagctgatagctatacccactacactgccttaaaggaacaacagaatcatatctttatttttctcaaagaaggggaaaaaatcatccagttgagttggcaatgagcacatacagaagaatgaatgcaatagacaatgatattctgatgagttgctacttgttagtcataggatgagaaaagaaatcattcataaaatctactatgactacttgataatgtctgctctaaggctcattcaaaaactacaacaccaaaaaccttatcctactaggtgaggttgcctacatgtccaacccaaggctcattcaaaaacaaagattaaatttccttaatttcatacataaacaaaatcataaacacagagacctgcacaaataaaatattagttttacagaatgaccttgtcttgaactccttcaaattaaagtcacgcctattctaaattaagtctaaccaatgtgtgggtttctctcaaaatgttcattttttgtttcacaccaccactaatttcttacaaaattttttcaatcacgcctatttcttacattttttgttcattttatatatacatcatcaccgcacccacaccaggactccttgaaccattttcatcagcagccattatcacgactttaaaacctcccatcacaatttcaatcctgaccaaactctatcacatccgtggaggtactgttgaaatcatcccccagaatcacacctccaatttcatctctcatatgttaaaattagcttatatataagtgaaaatgagcttttagagaagctagtatgggataagttaatttcattttttactagttagtttcttctctcgtaagtgcttgtgagaaatttattcaaacagaacctaaagtatagactccatagaggaagcacaagttaagttacctgcttgtggttccaatcatatatgggctcatcagcaccaactgagggagcaaactggagcacaacataaccttccttggacactttgaacgccccagactacaaaacaaacaccagaaccttctataaccaaacattaaatctacaattccaacacacaaaatagaaaaaaaaaaatcagaaactcatagcatacacttttcgattcaaattccggaggtctaggaatcacggtgagcatgcccttcttcgtgtaaacggagtaacccacgtacaccctttgctgcggcaattctgcaactgaacacacgaacatacccatcattcaaaatcgtagcttttgaaagaaacatgttgaattttgttgtgaagttgaagaacaaacatggagggcgttgtggcagtggagggaatggcttgggttgaacgaggttggggtggtagcatttgacagagagtgatgaagagaatgtgaatctgggtgttaaagaaaaattgcggttcaaaggaattttgaactttgaaggaacgaaagtgtgggttggtagtgagaggtgcttcaaggtaatggactgaatctgcgacatcttgcaccttgtctttctatcctatgttaatgttatttatggtttgaagcagtgttattaaacccggctcggaccggccgggttgactcattaacccgggaaccggtcacctaaccggtccaagacacgtgttaaaaaaaaaagaaactaaaatgacggtcccgaaacaatccctgaaccctcactcacctgagacaccatggttgatgtcggaaatgagaaggggtgaggtgagaagaagatgaagaaagtttgaattttgaaacacagaatagaagaggtaaagtgagaagaagaagaagtaacttgaattttgaaggctagcttctacggttgaaactgcacaccgcctaatctgtcaattagaattcacagctttaatacttgtccaagttcacagattcccacctttcaatacattaattttatgtttgtcaattttattgagaaaaaaaagactcaatgaccgggttattttcttttcctagatcagagaataatcccctgtatattattatatacacgaaagcactccaacacataatatactctctctctctctctctctctctctctctctctatatatatatatatataaagtctgggtcaaccatgcgaataaaacaaaaaactgtttttgaaaacagtgaacaaagcctaaaatggaattgtaaatatataatttcttaaaacaggccaacacttttcaatattactattattttaagtacctatctaatttttatttaggtttctaccaagcaatcccttgttccccttgtgctaatagaaataaagaaagacaaccaagaaaaggttaaaaaagtttcttaatgaagagagaaccgaatgacatgaataactttagttgctcatgattaattaagaagtggaataaagttgttagatggagttatctttcttttttatggctttatatgtattaatctattataaagaagtatccatgttaaaagaatttaaatcaacaattcaatgtaacagttaaaagcatggtaatcaatcccccatagttggcttttcatccttttgtgttaagcttcactttggcaggaaccactaaacttgaaattgatgagttttatttcgcaagagacatgaaacatgtctgaaaatccgttgagaagtaaaagctcacgtctaggatattgaagttagaattattagcttcttagtaaacttaaaaaatcacgtgtgagacgtggaaccaaacaccttaatagtagtataatactactatatttgaaaataatccaatggaaattttaaattgagttggggaaaaagataaatatttgccaagtaacaggggtgacctcatatccatgataggaacaggggagccaaaaacacctcaaacatatatgtatatatttatatgtttcttacttagtttgcacattctttctcttacacacttgaatttctaacaatattataatataaatcatatagtaaacttactacatatatgcctactatgtcttgttatcaaaagaaatgcatgtcttggtggcagaaaccgttgaacaaacataatacacatctaattaagtaaagaacagtgacataagttgaaatcaaaagacacgcatggatgataaacaaaatactatataatctgtgtatcttatttgggttaagaaaaggtagacaaacctgttgtgaataggatctggtccattgggaactcttcttttgctcatgtagttgaaatccaattctgcactgtccacaggcttatctctaccaaccactcgttcatgcttgaccctttcttgagaccattgtgtagttggatgtcttgttccttcaccactacctaagcttcccaagaagacaaacaagccccaccacaagaagtgctttaaagaaccttggaaggaaagaactactactactactaccacccatatgtaagttttgttttgttcttgctaattatgtgagttatatttgtatatttttatgtcataggaggaagatagagagatatgtctatgacatagacatatggacggtgaagagaaaagaaaagaaagaaaaaacagaaaaggctatctatgattgcatgatgattaattgaagtggaatagggtaagaagaagaagaagagggaaagagaagaagaggagagaggggtggtggagttaaggcaatgagaactttttttactgcaaaggattaagggtgtgtgtggttttctttatagattggggggattatatgttgcactttctcgaactgagagaaagaggggtttggaatcgagcgtgacatggaggcaaagccctttgctttatacggagaaagatgtcccaatacgacacaattcttttactttgatggtgtgagtgtgtattttcatgcaactacggtgtgccaaaaagattcaacttatcctgtcattctttacgtacaatggtgtaaaaggaaaataataggttgccttgcttctagtgtcactctctcagtagtgcctcccgaatcccacaagggaaggggaaagcatatatatgttgaataatcccctgtatattattatatacacgaaagcactccaacacataatatacactatatatatatatatatatatatatatatatatatatatatataataaacataatatttattaatatttaataaatgtagataatataattatcataaagtatatttatattatactattaataaatattatgtttattatatatatatatatatatatatatatattatttcgggtcaaccatgcaaataaaacaaaaaactgtttttgaaaacagtgaacaaagcctaaaatggaattgtaaatatataatttcttaaaacaggccaacacttttcaatattactattattttaagtacctatctaatttttatttaggtttctaccaagcaatctcttgttcccctccttgaaccttccgggggataacttttgtttagatcataatgtagttatcctatgtgacaatgatgaaacaaaatgacaagtattgaacaaaacaagattatgcacaacatagagatcataaggtggagcatccattcatataagtctgaacaaacacattgtcaagggttacaaaacacaattgttcttttaagtacttatatggttattcaatcagatcctttgacaaccttttaacagcaatagaggctccaagataattaatcagcagtccaactctgctcaacaatatctcgtactcttctgttgtattcacgtttgttttcactaaacatccgagcagcttctgaattcgctggagagtttgggtttggatcacaaagcaagctctgcaacaagaaactcagtttcatgtgagcagaaaatattcaaagcaaagcacaagtaacacattatattcttaatgcttaccaattagtcaagtgtatttctagtttacttaggcttttggaggatatataatcctcttatattgtacttagctcttttccatctcttatcttaaagaaaacagtgatagaactaaataaatacagtgatttcttacataaaggagagaatataattttttaaagaggacattatttgttttctagaagcctactacaacagttttctcttttaaaaagaaaaaaaaaatcgagattacaatacagccagttgttattgaaccttgtggaaattcctagattcttaactacttttttttgttagtaaacaagaaggcatgcaaagacataactacttgaaaaataagatgatgaaatggaaagaataaaagactgcaagaccaaaactgacagataagtgtattgtagacacacgaatctggcacttgcacatgaatctacatatgatacactcttgaactgttgtgagtatgcaaaactaatcgaaaggcaatatttcttatttcacagtcttaacagacaaggcagctaaaggctcctacaccctcataacttcgcacaagtataacgatgactccaatgaatcgctgctatcaaaagaaaggtacacagattttgggatgggatacaatcaaattagtgttcacattaatagtcttaaggcaataccaaaatatagagaatcactatgacctgaattgaggtaagtatcgccgcaacatcataaatcgggctccattgattttgtaaaatgtccaaacatatgcttccatctgcataaactaaaattgacaaaggaaaaggggctcagaactgcaaattaccgaacttgacaaaagcaaatagtacttaattacttatttccatacagattcattaatccattgaaagaaacaaaaaagcaaactcttggttcaccagtgacttccaaaatccaaatttatttggtagatttaaataatgattttctgttctgtttgaagttggattgtaagtcatgggtgctgaatatacaaatagttcaagtggttgctatttcaattccattatgtgattgcagggttctacacatgttgactcagaaagagaggcaagaaggcaagttctagtttcctacttactgttgggatgaaacatttgagaaacaaagcgcactgtaggtggtttattaggataatcctcggtgaactgaagtgttaacttaaatgtgcctgaaagacgcacaaattagatcagataagccatactgaaattataagacaaagtaaccatgtctaattaaaataccctcacttgaagaatctatcaaacagtaaaatcaatcacctaaagatgcctaaaatcaataccaaaacctgtagcactataaatatttgcttgaatcaaataaaagaacaccatctttctagatgcttttcaaattggatgacagatataaacactaatattcttgaagatttctagtacttgcatcttaaaaaaatcatctgattgtactttacagcaacataataataataataataataataataataataataataatagatagatagatagatagatagatgcaaagttcaactttcttcttctcaattattaggggtgaaggttgtgctatcatatcaacggtaatagaaagatgctatgcctaggggctaattacaaacaaaacaatcacaactgatcatcttaataatggaaacttcagttaaatgtgcacaatctttggtttaaaatgttaaaggttcatcaagaaaaggactgcacaatctttggttagtgagtgacgcagaggggggagagaggaaacaaaacagtatcttaggacatgcaaagaaattttcatgtgaacattgaaacaataaagtctttttgagtaaataaggtagaagatattattgtacctccatcccagggggtgtcatccggtctagaaaaacaacaaaaaaagcaaaattagaccacaaaagggaacaaacccttaaggaaagaaaattcttcggtatactaacatacccgaagataactgcattccaaagcataatattattgtcttgaggagcaccactgatgccagcaggaggatctagttgcaatcttttgaaatctctcatgagtctcttccttgcaggagttgacatcctcacaagtcacaacctatattccaatcaagtccaacacaagcagtggcaatcagtaattgacaagccattgtgcatagagaaacaagagatggataaacagagagcaacatcagcaagcaactgattgaagacagtagcaatctacaacaaattactacacaacacattaaaagtttaaagaaatgcaaacccgcacaaaatgagagataaaattgatttttctacagtggctcacaacaatcaagctagtacagtggtacacaatgatcaaagttcataatttccaaaattacgtatgatggaaaaccaattcctacagaggacgtgttattgagtttaaagatggattcatttccctgtcaaagtcaaaaccacaaagtggggggaagcaaattcatgcctacacaacacaaataaacatactcaaggttttccaaaatacacaaaaacttggtttctcaaaaatcacaagcccaaatcctcactcggcagatcaattcttccacttttctcataaaaaaattccaacgcaggatttgtaaaaagtaaccaaccgtttaactacaaagcaaatgggcatcacttggtttcataaacaaaccttcctagaacatcaaaaacaattttttaagcaaaaatggggttaagaaaagaacaagatgaacctaagagagagactggtgacttgtgagtgaagggtgcagtcccaggagaaagcaaaagatggaacgggttataaaagatgtgaacgtgaacagagaatttgatttgatcatttgaaaagtgcttccatgcttatcagtactgagagaaagagattcttcttcttgttatcatcatcattattattattagtactatgatatgtatatgaaaattaaaaaaaaaaaaaaaaaaaaggttgtgtcgctttcttttctcttgtaaattgtactaatgcaaccactaaccactcatttgcttggcaacttgaactgctcatgactgaagggtttcacacgttgtaatggatttttatatatacacgcgatgtctcgttgtttgtgtgaaaatagaaatcggcatgtgtgtgcgtaactactaactactactgcctgtagcaaaacttaagtcatgatggtgctaggtgtaggaaggagttagtccaatcacggttccaataaacatttatatttaatatctcatgccatcttgaaaattatcaacattgtattaagtttatcactttgaagattaatttatataaacaaaacattcaagtaccaaacacacacattacttttgaaagacaagaatgtatttactcatttatttttgacttaattattaaaagattcaatttggtttttaattgtgtaaagatctaatttaattaaagtttaagaaccttcttttatattggttgtcaaataactaattttaaaaaataacattttacatcaaattataacatatttgacaataaaagatataattattttattttaaacaattaaagtatcagattaaatcttatataattaaaagattaattgtataattaaacctatatttttctctcatataattatgtgttattagtataagcaaatccttacaataacattttgggattcttctttaaacactatatttttatcaaattatttattaccccttgcatcttttaattataacacatataatcacttctctttttttttttttccaaagaatctccaccgaaaataatagatttgaatttgagacttttaattacatcgatttatgtgtttggtaataaattaaagaatataaccgcttatatgtgtctttaagttcgtttaaaaatgaatgaataaaatatagaataaaatctttattaaaaaaaatagtactaaaacaatttctcacctcttcagctcgggtactccatttagaagggtctaactacctcacaaaaattaccccctccttgtaaatgtttcaacaatcactgcacattaaactttcttatgtattgtcgagttgaagttttattaccaagataaagaaaaaactaacacgaagactttgcctcaattggaaaactatgggagttaattagattccctttgcagagttagaagacgttatatattacacacaaacaaatcaaaatcatagattatggcttatatttggacagcaatgaaagatacatgcagaagaacatccaagaatctatacagttgtcttctattgctgcttcatgcaattaatagagaatatctttgatacttttcagacaattaaattggtgcagaacaagttgatatatatgctattgctgcttcatgctttcggcactgcatggggcaatacatgacagcaatatataatattataggggatacattatacatatcatgaattgtgaatgggagaaagaaaaaatgaacaagttgatatatatatatatgctattcacccaatctcataaggttatacttttatgagaatattaaattaaaaggattaattgtaatattcgaaatcttaaaaagacctccccagtatataattaattttgttacatacaaataaaacaaaagtgaatttctttaaagccttttagtataaaatatttttttgccaagtgttgagtattaatttaaaaaatattaattcaagtacaagcgcgaatcttaaattaagttcattttatgagaaacgatttcaactctttaataattatagattgaatttttggtcgagataattaatgtgacatgtttattaattgttggatgggaatgatctatatcgcttcatttgaggcagttatctccttttttattttgcacatccatgcatctaaaaaaacattttgtggatttaagagattaaaaaatataaattttaattgaggattaaaaatataaaaatttaaattttagagactaaaaacacatttaaattgtcaaattaatatattaaaaaatcttaaataaaaaaaaaatcaagaactatagaaataggtcaatcagtatgtcaggggcttacaacttagttagcctaaagcttagtctaatttgatctatttattaaaaatatcagatttagtctttttaagaagctttttttaaagtaaaaagttgaagcttcaggttttaaaaataaagcctattaggctggccaacattttcaatcatgttttttttctgttgttagtaggaactataggttaaatttaaacttaatataaaataaaaatattaaataacaaaagaaaaataagcaacaatacaatatatcactttttattttgaactcaatataatatatcacttaactatagtttttgttggctcaaatgccttacatattaacctaaccttaagacttttattagaactcaccactcaggtcataaatcaataatatatgaaaataaaattaaaaatatctttctaatatcatcccatttgaaatctctttagatacccaatgaaagaaaataaatttcaacctattcaccatgcttcaaaatcaacctcttgagctcaagtaaacctatttaactcacctaaattgattaggttgttgtatgcttaaacccatcaattcacataacccaattgaattcaacctactaatttgacatgtcaatgtcgagttgggttgacttgtcttattgatatttttttaaaaatttaaaattaaaatatttgaatgttttattatattactagcataatttatttatatttttatggttgaaatatataataatgatttatttatttatttatttgatgagttaactctcatgaattatatctttttattatttaatctttttacaatttttgacggatcaacctagctaacctaatccattaaaaaataattcttaaatatgtgctcaagataattatttaaattttgtatacagagggtcagtttgatcacccaaatgcacatatacaactccctagttaattatatattgagtcctgacttttaatatccgaatatataaatatttccttaacatctttttatctttttcttcttaacatattaattactacgtctttaatggtaacttgtgccttacacaagtggaatttaatattaataatatatattaaaatttgtctacttatattcttataatatttttttgttttcttttgtaattttttagacttatatcttctctaagtgggtataacagtactataatttgagtcatcaacacagaataagccgtaaaaaggtgcgaattaatattacactgccatttctcttttcaactaaaatggatagatgtagcaaaaaatttagatttatatggatgaatttctaccaatttagccatggatttttttttttgtttcttttatgatactccatcatggctttttattttattttgaggatgaaaatattaatgactatatatcctgtttagtgattttgtgtcatctacaaaatttagttaattcttaattgaagcttcccaagttctcaaagttggcctctcctgattaatcattgacttaaaaaatattcgtgatctctatctagtaaaaatgatattatttcgtaattcaaaatttatagtatattataatggtataactaattacttacctctcttaatttccattttttgaatgtacagaatgtccaaatattttatttccttttattttattttatgcaagactatttaccaaggcatagcttaaggagatgcacccttgattcattcgtttactcacgaaaagagccaaatcagagttgcatggacacaaaacatgcaacataacattagcaactcaaagtcaatgaggagagatcacataacattagcaaaactcgtatcagatggcttctacagagaagcactctccctcttctcccacctccattcttgttcttcccacacccttcactctttcaccttccccactctcttcaaagcatgcaccaacctccgttccccttcccacacccaaaccctccatgcccatctcctcaaaaccggtttccattccgacccttatgcttcctccgccctcactgccgcctacgccgccaaccctcgccatttcctcgacgcactcaaggcgttcgacgaaatgccccaaccaaacgtcgcatctctaaatgctgcactttctggcttctcgcgaaacgggcgtcgcggagaagctctccgggtgttccggcgagctgggttgggccccttgaggcccaactcggtcactattgcgtgcatgctcggcgttcctcgtgtgggtgccaaccacgttgagatgatgcattgctgcgcggtgaagttaggggttgaatttgatgcctatgttgccacctcgcttgtaactgcgtattgtaagtgtggagaggtggtttcggcttctaaggtgtttgaggagttgcctgttaagagtgtggtgagttacaacgctttcgtttcgggtttgttgcagaatggggttcctcgtttggtgttggatgtgtttaaggagatgatgaggggggaggagtgtgtggagtgcaaactcaattcagtgacgttggtgtctgttctttctgcgtgtggtagtctacaaagtattcgttttgggaggcaggttcatggggttgttgtgaaacttgaagcaggtgatggggttatggtgatgactgcacttgtagatatgtattcaaagtgtggtttttggcgttctgcttttgaggttttcacaggggtggaagggaataggagaaatttgatcacttggaattccatgattgcgggaatgatgttaaataaagagagtgagagagctgttgatatgtttcaaaggctggaatctgaagggttgaagcctgattcagctacttggaattccatgatcagtgggtttgcacaactaggggagtgtggggaagcttttaagtactttgggcaaatgcagtctgttggtgtggctccatgtttgaaaattgttactagccttttgtcagcatgtgcagattcatctatgttacagcatggaaaagagatacatgggttatctttaagaactgatatcaatagggatgattttttggtaactgctctggttgatatgtacatgaaatgtgggcttgcttcttgggcacgaggagtttttgatcagtatgatgcaaaaccagatgatccggcattttggaatgcaatgattggtgggtatggaagaaatggagactatgagtctgcctttgaaatctttgatgaaatgctggaagaaatggttcgaccaaacagtgcaacatttgtcagtgttttatctgcttgcagccacacgggtcaggttgatagagggttgcattttttcagaatgatgagaatagagtatggcttgcagccaaagcctgagcattttggttgcatagttgatcttttaggtcggtctggtcgattgagtgaagctcaagacctgatggaggaattagcagagcctcctgcatctgtttttgcttctttgcttggtgcttgtaggtgttacctagattccaatcttggggaagaaatggccaagaagcttctagatgtagaaccagaaaaccctgctcctctggtggtattgtctaacatatatgctggactgggaagatggaaggaagtagaaagaataagaggggtgatcacggataagggactggacaaactctctggctttagcatgatagaacttgcatgaaaaatacttaaacagtaaaaattaaaataaaatgttttctcagataacataagagtttgttacgtttggaatgtttcatctatttaaacttccataaaatcactgattcaacatctctttcaccgcaaatccatagtaatcgtcaaaattgtaaggaggttcggtgacaaaacaagagatcacatctctcagtgtaatgactccaactacttcatcctgcccatctactacataaatcctgtgaatagactgagaagcaagagtatggatcacaccctgcagtgttgagtcaggcttgcatgttatggattgggtaacttttccagtttgaagggatgacgagacaattttgttcatgaaattcatcacagtcaacttcctgaaagtcaaaatagaggagcagtaaaggagaacatttcagttaagcaattagttcagttacatgttacaagcttctgtaatgaccagaggtgcacttattgtttgttttcctcaattttaaaaatgaaaatcacctcatacagacacactcatgcccttttatattaagtagataatcatatagccctggttgattatattctatttaaatttgtcataatttgtttggttatcttctattttgtttttactgaaaactatcttgtatttttgagtttccctcataaccagttttatatgcttctcgtcttctcccaaagtgaattttattgttgaaactgtaaaatacattttcatctgattttggagttgttagagagtggcatatatgtcttactaattgttgtcaaagaagtatcccatgcagattcaagattttttacttcgtcttacctaaaattggtgaaaagctcaggccttagaagtaagtgtctgatgtctcgtatgctcaagtttccaacaattctcttctttggcccctctactataggaagaccaccaattttattatccctcatctgcttgaaagcttcaagaatcaattcattgctctggatgctaataacctggacaggaagaaaaatgaagattttaaaacctttaagcaaagggaagcttaaaatttaaaacaccaatccttgcctcatcagtagacataaatggaagtcccagatcagctatacgcttttccgcaatgcagtcaaaccaatctcttcctttgcatccctcgagaccttggacaactgctgattgagtaatgaagtttacaatgtcaggcttacctgtttctatcacaggtacattcctcagcctgtactttgagagaagcagcaggacagtcaacatagcactatttcttgcaactggaacaaaaggagcccatcggtatgatttaattattgatcgcacctgaaaccaaaaatcaacataaatgtatctttttctttccaatgtggaggtaaggaaagaattttgctgacctataattagctcaataatgtaaaaataaataaaaaaattcccaaatggattatgcaagaatacatccaccatttttctgtgaaatggatatgattgactacaaacacaacaaaagccaaataaatagctaactagcctagctctgctggcactggcctcctctattagtgagatatcctaacttaaaaatatttcttcccaacccatcaataccaagagagaaaatgcttacataagcataaaagccaagaatatgcagttccagaatctctggcattatcatgcttaccgttgttgacttgaagggttcttcttccagtattattttgtaaaagtcctctcctaggttatcagctgcttgaggtgcatctttagccaccactctatctgcagcaatgccacctgccagtgcagcacctgctgcagcagcggttagcccagcaattgctgcaggacctgtcactcccaatgctagcgctcccatagcaccagcggctcctgcaccaactccagcagctgttgctgtacctaccaatagtgctttgtgtgcaagttctgcaccctccagcacccagagaatgattgctgaataatctatgatgccaaggtaccttcttctccaatctgaactattagctgcttctgggtctttaactggagctgataaaatgttgctttcagatagaatcttaactgcttcaccaatgggcgtgtctgctagaatttcaatcactaccaaagtattttacatgttagtgtttttggccatgaaggtattaaatgcataaggtaacagtgatggaatgaatgctttttaatggttagcccctccttaccttttccactaggaactgctggaaaagaagaaacaggaatctttgcaaatgcatctgtcaaggtctcctgcagagacagtggtagcttctttctggattgtatggtttcgaaataggtatcacactttggaagtgtggtgctggttctgtactcttgttcttgcgccatatctggaactaaagacatgtattgctattaattaatgtttcgataattttcttgaaattacagaattgtagacgtagaaatatctagaccctcagcatggtttacataaaaaataaagctatcactttctggtgtcaaaagttagcaggaatcatgggatgttatcacatttttaaacagcttttgcaaccacacccaacacaatgcttttgaactgttaagatgaacagattctgttgtcattttggttcattcatctctctcatcttaatcaccccctggattttgtttctcccgaatatgaaaatgaatgacaagtgactggaaatcctagatggcttaatagtatggtttcatgtggcaattctatgtattacattttctttggttggaagttatactcatattggaaagtgacttggtatgatacccctgcaagattcaacaatgtaactcttcgatctatttatcgtctggaagaactagtaatcataattactcatctcctatatcatatagaacactaggccataattggcatttccacctaatatgatgtttgattggaatggctaaatcaaaataattcgtgtatcataacggatgaatttgaattacaatatttggttgagaaattgtttattataggatgcataaaaatgaaaccgattttgatttgaaatcatgaaactatatatggaaagataaataaatgtagattgaacaacagattttgatttgaaatcatgaaaccaggaaaagataaataaatgtagacagagtgaacttactgcttgaaatgcttctagtgcatgaataacagaatttgatttggaaccatgacactatatatggaaagataaataaatgtagattgaacaacagattttgatttgaaatcatgaaaccatagattgaacttagtgcttgaaatggttataatgcatgaataacagaatttgatttggaaccatgaaactgtatatgaaaagataaataaatggagatagattgaacatgacgtacctgtcagtatgtgaatgaatgccaacagattcagacccttgttggagttttaattctgtggtctattggaaaagcagttatgtgtggtttttttgaatgactgctgggggttgctagcaatgccaagtgttgttatattacatgtgtcagtggctgattgaaccatttgttaactgctaattgtttttcatccctttagatgatcactctcacccgctattggaaaacagattcagacactcttacctctggattttgtcatcaacaaacgtctccagcaaaacttagcaggcccaaaattcacccgtaagccaatggctcatggacggaaccagtgcaccaactacgtgggtgttttctagtttttcatttcataattgattttttatattaactatttttttttaaagtggagatgtattaatattaattaattagataaaaagatattaaaaaaaatagaatctcaatattttttaagatgacactgaaaagttatataaactattaccaaatttaatatctctgtctaaattaaataacttacgttatgtagtgtagtttttgtgttttgcttttcttttccttcatgaacaaaaaaaaaaacttcgtaattcttacatgaagccattaaaatttaaagctatcttatgcatagaattagaggcagttaactaaaggtagtttgatcctatttcattataagcagtttgtcatcttctcaccattccgaaatgcttaccatgtttgtttttctttcacattttgctcacttgttaccgtaattaacgtcgagtctcgctagaagctgcatgctagagtagagactccccctcaaacctcaagggaactttatcaagccaaattgcatgggcaatgattgctttatatatatatatatatatatatatatatatatatatatatatatatataaaatcccatccatatatacctcaacaacaataataaataaatgttatctacaaaataacaacttcattatacaaagggaaatagtaaatagtattacaccgtgctataatctcaatggaaatttggcaattgtgaatcaaacaaccttgaaaactgctgatcaatgcccttcaatattcgtttcgatgcaattttagctttcttattttttaaaatttattattttaatcttcttatttttaaatagagatatttaatttttctattttttaaaatctacaattttaattattttatttcaaaatagagtatttagtatcttactttttataaaatctttaattttagtcattcgctaaactggaaaccttgattgttaagatattaattgatcataacataaattaaataaataatcttgtgtcatgttactaaattgggatcacacctgattgacttttttttatcaattaacactttttaaaattgatggaaggatcaaaactataaattttataaaactggaggattaaatatctttattttaaaataaaaaactaaaattatggattttaaaaatataaaaattacatgtctttattttaaaataagaaaatcaaaattatagattttaaaaaataaaaaaactaaaattacattgagtcattcctttctatttgccaaaacaaaacctggaaaaccatagatgtaactttcatggatgtcctttgtaggttatgtcaagctcctttttcacctcttcggttctcatttaaaattgaaatcaactctaccaacatcttatacaaacagacacatacacaatgctttaagttttgtttcacttccattgctccggtagtggtagtggaaatatacttgagtttcctatactattttcactgcgtagcagctttaagttcatcagttctgcattctcaagaacatgattttctcttaacctaccaccactagcttcattgccaacatatgctgtgagagcagttgctagtgctgattgaaattttgggttgcttgtgattattgcctcagttgcagcaacaatgggattagggaaagaatgctgagaaatggtactattgttgctcatgtaaataggttgatggagatgccctagagaatgtggttgattttgatttcccgtgtttaacatgtaattaccaccatggtgtctattttgagaaagtgttccagagttgaagtaaccactataactgttccaaggtgattgcggcatgctagaatgcagaggagagaaacctgaggaaaagttaaggtttgttgatgagtattttggcatgcaagtgaagcttgagtttgaggaagaagttggaggtgttgtaagatctaaagtgattgtggggtgagaattcaaggttgaaatggatgagttggggaagtagaattgttgtggtcttgaaacttggtgtgtagagaagtttagagcattattagggttgtaataaggagcactagagttgatgatggaggatatagctgaatcaactaatccatgttgtgaactcaatgagggagattggagcatggaagctgcagcagaagttgtgcaggccattgcagtggctgacataggaagagggtgattgtgagttccttcataggtggtaatcaatatggacatgtcttcagcacatctttgcacctgaaaattaattaattacaagaaaatgatattaattaataacatgtttagtaaaattagcttataagctatataagttaagagctgaaaccttgtaagctaattatagtaacttatatcaaacacaccaatttttggattctaatttcagcttaatttgatgtcataacatcaataaaaaagttaagaaaaccagtactattcaaacctgataaatctacctttacttttactaactaatcacttgaatgcccaagtacaaagtgctagaagttaaaaagatttgaagtgtgatagtgtagtgaagtttagaggaaatagagtaccttactagctattaggcttcccatcccatggcacaattaaattagcaactcaatttttattaatctatctaatctagtccaatgtaatatataaaatagtgaaaattgagatactacttaagagaaacaaattgaaagagtaaagaaaatgaaagaaataaaattaattattaaatacatgactgcatgcatgcatcatatgtatctagactaattgttaattttcattgttttctatatgcccatcgaaaacaaaatttattgttttctattctgctatgtttatttattattcaaaacaagtcattagaggattcatacctgttttcttacaggacaagatggagaagcagtgcatcgatagtaagctcgggggcatggatttcctttggccattttctgtccatattttctccaatggcacccatcattcatctgtataaaaattgaataaatcatgcaagttttaatttcagtttttttgtttataaattaattaaaaacaatatcgcaatattataaaaatgataataatccggttgcaagttttttagactaaccttgcatcttgacaccttcctaacttacgcttttattttctcttccaatatttgttttctttaggattgatttctttgaatttaatatttcatttaaacgtgttcatgcaataaaatcaatcctagccatatattgtcaagaataagcaatatatcactatcttacataacatcattaatcaataaacatgttactaaccgtttgggtatcacatctggctctaatagaaaccctagtcttcttgggctgatcatgttgagaaacttcacttttatccacacttttcattgtcttcaaaactttactgggtggccacatctcagttggttcctcttccttccctctctcaccaacaaagctactttcagtggtggaattatttgcagtcaattcatcttgatctacagggtccaaattgatatctaacccaagcacaagtcttttattatgcacatcctcatcttctgtcttttcaattccatttttgtttttcaatattttctcatccttggtaggcttgccttttgatattgatatcccaagagaaagtgacacaagttcactttcttcattttcctcatcatggctaaacacacctttagcatttgtagcatcttcaggtttatcttgttgaagaatctcaaagaattctaacatcttgttttcttctctagcctctcccattgtttcccctttagctgattcaagatcttgattctgcatgaaataatgacaacacatatacaagagacaaatatttataattaagactatatagtataatattagcaagtgattactacttttttatgtgatcagatcgagagaggaaaagagatgaaggaatgaaaggtaattcgagtatataataattcctgggtgatgagtgcaattgaaaaatgagatttcttatgagatttaaacacgtatggtcaaaatgcaattgattactttatacttttgtgcattgaaaaaaaaaaaaaacggttatcatgttggtgtaagcgtgtgtgtatagtatactatgcatgcgtcttttacacttctgggttttgggttgactccatagctacactgtgcgttgaaagtgtttatcttgatttaggactacttaattatcacattaattgtttaattaatttgagccgggttaagtagggcaactaataaaatcttgttctgagttaacttttaacctaattattataattataattaattttaggaatttaaatttaacttcattattttaagataatataaatcaataacaagttttttttatttcattaataaatgtaatccttcttattagtcctctaaaattataatatcattgcactaatttgaaattttataaggaaattaaatataaaagaagtgtaatacagtaatgtgaaacaaacattacatactgtacaaatatcatgcctttcgtgaactccagtgtcgatgtgaccatcccacctataccaaaaacatataaagacgacttttgaccaaattattcgtgtgtgctagtttttcaacatttctccagaaaatagggaggaaaagtagaagcatatattctaacataatttcagctttaaggtctacaatattctagttctaaataaattgtttttgtctatctaaaaacacggttaattaattccatccctcctccccctttgttagaaaaatcggttcctcagtgaaaaggagaagctgaaatatattttttccaatgggagaaaagtaagaatgtatatttaattgtaataaatttactttctattttattttttaatattttatgaagtattcaaataaatttatataaaaggcattagtgtttttttatttatttaataagtagaaattaagatgtgtaagaacatattataagagaatattctaaattattaattttttaaaagattaattaagtttttagtcttaatttttttaaaaaaaattaagttttagtctctaaaaaaaaatattaactaaacaaggttccttgaagcttttttgtgtcacgatttttagttcctatgttaaatgacgaccggacaggctatgaaactatcattgttgtatttaaattatttaactgggagttcattttcttatgacttttaactgccagaatttaatcacacattatttgcagtgactaaactaggtcacacaagatagattgcatgatcaacattaaaaaagaaagaatcaagcaaaagagtcatcaactctagagacacgaaaacatataaccaaaaccattctcatcatcaccatcaaaatagtgaagtttaaaactgggcaagattttcagatctgatcttcccacacaaaaaggaacaccctcacgctctcagtatccctcttttaaatctaatcttcctccaaggactccaccctcaaaccctcgcctgtagctcagatgttatgaacgtgatatgtgtttctatttttttttttttttttgttggttcaagttgaaaacaagtttgatttggatgtttcagttgtatagtgtttcaagtttatcgtcttgtacgttcagaggtttcattttggaagaatacaagtttgaatgtgttagggaccagttttggaggtttttaatagcaggaaataacttttaaaagtaaacactattatgagatatatttttttagtgatttttagtcctcagaaaataactcccattaaataattaaaaatataatatatggcagttctagaggccatcatatcgccatataacaatacattataacgttataacggtattaaaaacttcaaaaaccttcattctaacattttatttaaagaatgaaacttaaaattttaagaaattcagaaagttaattaattgggtaaagaatttttttcccgtaagatataataggagttcaagtacattatctcagtgcaattctgggcaacatttgtaataataagccacgtacacgtggtgtatttttgtaaaatataaaaataaaaaaaatgtggccggtatatatatatatatatatatatatatatatatatatatatatatatatatatatatatatatatatatatatactttccaacatatcttcaattataaaatcattagtgagactaatcaattaaaagtaagacttacatatatatatatatatatatatatatatatatatatatatatatatatattcttatacatgtactgtaatataatatgtattgagccaaccgcaacttttcttatttctgttgtcgacaatatgcatgcatacaaccattgtttgtctgaacaatcatattctgcatttcaattgactttcattcatatgatgagttgaattgagcacgggcataaaatagagacagttggtgctttgtgtggggttctccatatactagcttctgtttatagtatattaatttatgtaagacacgataatacagtcttttaatttccccagcacacttaattcaagtggaattttttcacttaaaatttttaattttttatttgctagatcaaaatcttctttttttttccgcttaattttactaattaaaatatcacatttcaattgaaataaaaataaattcatttttctctccacgaacttcaatcctacctcctacaaaatctttcaaaattcctaccaaattcttaacctttaaacttataaaacgactttatatcccaaattaatcataaatctcaaatatttagatacgataaaaatgagaatttgggagtttcaagtaggaaaaaaaataatagaaggaccaaatttttttaactttaaaattaaatatagagaaaattaatttgaaaaaaagaagcttgaacgatcaaaatcatacatagcccaaactaaaaggacaacaaaatgcaattaagctaatcaattattaaagtagttacttatcattaaatacctctttaaatatataactacttttggtgtacttgcatttttttaattttttttttataatttcccccaaaatatactgatctgaccatcgatcggttgcccaaacgtccaaacataattttatcatataggataatgttcttagcgtgtgtttagtttcctatggtcacaataccaaaaagttgcctatagttgctttaaaaaaaacttaaatatgttgttgattcatgatatatattttatttttatgtttgatttttgataaatttttattttgaattggctccttgatatttgaaaagttttattttagactcttgctacaagttaggtgatgacatgcccattaaatatttgataagacgatttgtgacggctcaaaaattgacactatttgttaaaaatcgctaggtatggtaaaatttcatttttcttcatcttccaaagtagaaatgaaacaattttcaaattttccatttctttcttcttcttcttcttcttctctcttgcccgaataacaagttgaaaaacgcagttttaactccagcatcatcttcttgttcttcttgtgtttgcctttcattttataaattgtaaaaatttcacaacacaaatttttcacgcgtgacacatcaccaacctctctcactctgcatctcgagctacatatacatcctctctcactcttattcttcctcctcactaacctcacccgcctctacgtcacgatccaatccaaaagagacccttacataattctctgcttcttaatcctcctcgttcaaccttcttcttctttgacccaacaaccccccaatttagacctcgataacatctacttcctttgcgacgcccacgttgtctttgttgccgctgtcgacaatggcgactcccatgtgcaactcacacgccccaccccttccttctctagcatcctccgccatcgcgagcccctggctttctccgaccccacatccctctccacgaagttctccttctttgtctctgtgatggccacggcctccttgtccttgccgccaacgacaacgtctcaaactatgttggcatggagttcgacacctccaaggacgacaacgttggaaacccgaacgcgaaccatgtcagcatcatcaacatcctctctcactctacatatggtgggggagacgttggaggtgtttaacgaaatgattaagagaagtttatcatttatttttttactttaattgattctgacggtttttaaccgtcaaaaaatttaaatttgattttagaacaaaaacaatttttgagtcaccacaaatcgtgctatcaaatatttaatagacatgtcattacttaactaacgatcgagatctaaaacaggatttttcaaatatcaagaagtcaattcgaatgaaaaatttatcagaaatcaaacacaaaaatcgagtatatataataaataaaaacatatttaagtcaaaaaaataaagttgcctatattcattacatacattaattacgagaagaaaaaaagcataaaaccaaaaaaatccttgcgttaacctaaaaatatttattacttagtctctcttttttttttttacgttattacttagactctattctaattctaaaaattaaaaacaaaacacacgctaaaatgtttaaggtgagtcggtctgcttcctcattcatagtaggattcaatccaataccttggctactatataattcacgctgcaaagtacatacaaactaatttttcaatcttctagaagaacctattacccattattgtagctcacaaaacatttcattaacactatctgaagtatgagatatttgactcaataatgggaaaaatgactaattctcaccatgtgtagaaacaaacaaatcatccgaaaaacacatcaagatatgctttttgaattttgaggtgatttattgatcaaattcaatggtcctatgatagaaattaggctaattaaaatcgacatacacgcaccattaattcctaactgtaaagatcgttcactcctgcagccacacgtgtgaatgagttataagtaaattaaattaactaccttactttggaaaaaaagttgaagcagctaattatatacagatacccagaaatggaatacgaatgtgaaatagatatataatttcaaaaagcatcaaagttctttggaaagaaacacattcaataaaagattttagagcaaagaaaatcacaccttcacattgatctcttcatcaccattagaatccaagaagttattatcttccattactagtaccgtatatatatgatatctcggaggagaagagcaaagtttagtttctatgtcgacaaattttctctatgtgcccggcttcttatatactatagctctcagatgttcacataaatatattatatatatatatatatatatatatatatatatatatatatatatatatatatatatatatatatatatatatatatatatatatatatatatatatatatatatatatatatatatatatatatatatatatatatatatatatatatatatatatatatatatatattagttggctttcttgtagataaaaaaataacatattataattctggatttcaacgttcatgagagagattggagaaatattttattatatagaactcatgccacttgaggtaggattgaggattcatctatttgtcaaagttcaccgcatgcattcaacatccttgacaatgatcaccaactgtcaaattttatgaatttaaggtgaaataataaacaaggacttttatacaaggggattggtaacatactcatgcctatattttagttggagtatattagtaatttactatctgataccaacactttaggacacaaaaaacttatatctcttttgttttagttatattgaagtcatttaagactttttttaaaaaaaaaaatactttttctcttttcaccgtcctccccactctaactcattcctctctcatctttcttcctccttctctcacgtctgggtcggcaatgctcattttcacgtatatatatatatatatatatatataatttcaataacaaaagtgaaagttataggataaaaaataaaacttcatttataagtcatacgatatttattcatttgaaattacgggactgtgtatccttgatctttagtgtgacatacattgtgtacttttcagtcaatctagggccaaataagacccaacaccctactaccgactgagacagagcctaatgacatgaagggtattaacgaattggaaaggattaacatcttatccttgttatccttctgcaatatctaatacatatcttatcgtattcaattatatctgtagaattctatcatatctcaatcatattctagttatgtcttatctatgattaaggtaataatcataaactttgggagcctatataaagcacacaagatgagcagagagtcagagaacactagatgttctaggtaggctatacctctaatcctagattgagaaaacctatattcctaaacagttataaattgcatcagataggtggattcacacctcttacaattaacgtagtacactggttcttggggcattaacaatttgtttaactttacaccgttgcaaagtatcatttctaatacatttgttaggcgaatgatcaacctttcattatataattattatagtttatataataaggaatcaaacttttggaactaaatagatttgacgttggagaaattcctcaagaatatatattttatagaaattaatcaaggagcaggcaggagtaattgactcctaactaatgtgtgtgaattgaaaaacaaattaaaattgttactaaatgattgctcaagcattagtacatcattccagctaatgaaacatgagaatacgaatatgtccctaattttcaaagccactccaacctttgaagagccattcctgctgcaggctagctgcatggaagaattaaagcattccagcattataaggatcgttgcataccttaattctatgaccaactttaagggccggcaatgtgtatacgtggatgtacataatatacgttaattattcacggcttatgaagtttctcattccaatattactattactatagtattgattatgcttttttcttttaggaggggggagttgttacttgtttttcaaagaacggaataaatctttgatatcaaaatatatttacaacaaatcataaatactattcaactttttttattcatacaaattaaagatagatactaaagatttataataatttatgtcatgtattatgtttagttaattaaattagactttcttcgtgttaaaaaaaaagaatattcacattgtatgtttttaagatttcttataaagatttattattattttcgatgaggacaacttcataacaatattatggtttaaaaaaaaattaccatcttagtacactacataactaattgaaataaacccatttggtacttaattatgtttaacaagctccgtgtgcctctaagaatatctaattttttggtgctgagaatatctaataacttttggttcttgaaccacatatatgatgtagccatatgtaactcgaaaggtagctggcatatagatgtacataaccattgtctataggggaaaattagttttgtctgtaagcaaaaaattattcaggagacaaacaaattttagaaaacagatccaaatttatttttgaaaacaataaataaacaaaacaacatggatatattagttttgaaaacaattttcaaaaatcaattatcaattaattaaatatgttttttttttcaacttctgcaaatgatgcatgagtcatcaaaggaagcaattaattacttgttatttggtccaggaaaggaatgctgatcaatgtgtgtggcctatatagcagtcgtcatcatgtttgaagatccactaagtaatgcatgaagccgcattaccttgtcgcatagatgtaattaaagggcacctgaagtttgaactttgaagatgtcggtcttttcactgtagtcaagaaattttatcagttatatacattttatttaatttattagtaaaattcatacgtattagatgcataccactactactatataatattttttatttccaaaatgacaaaactttgggggtaaattgattggagactttggcagttggcattaaaccaatctcatgagcagacattttttttctattttgttttgttgaaagcattatgattatgatttatatatgaaggatattcttatttttaaccgatcaaaaagtctctgtaaaaaaaaaaccaaaaagtctatacaattacgtatcagaaataaacccaattgtcttaaccttctagctttccatgaaataaaataagacagttttatgaaatcattatgtttgcacacctaactaaaggaaattattattactattattatatataaaaatcgtatttattaagggtacattaattaggtaaattatttttgtaaagaaaagtcgcatttgagtgtgaattcttcaaatactatttagtttctgtttgttttgttgatccaaaatcacgatcttgtctaaacaaagtcaattacaaaagaatagtgtttgtttggttactattttctcattttaaaattctgaaatgagcagaattaattttaagaatttttcttaacatttttacataaattgatttcaattatgagctttacaataggtgttgagtttgagtgtagttacgtctaagataggtgattgttttatctccttttcttattgtgtaactaaactctgattatgaaattggtacttctggtacccaaatatattcaatattttgatttgctgataaaaaaaattatgagctttacaaattatatttttaatttgtactccaaaataaatctattttactagttatacaaacttattttttcttaatttacttttaaaacatcatatttaaatacaatttattcttctaaaattgttttttctaaaatttaaaaacgtttataaaaaccattttaaatcctgtggggcttttttaagactagttaaaattatgtggtttgtgataattgcaatatctaaactcttctcttatttaagattttgtttgtgtctttttgttgttaaaattgaaaatgtgtggtttttctttttagtttatcattttgataggttatatgtgctcatggatggagtattttgtaggaacttgaagtggattgaatgacaacttcaatgtttgtgaaagtttgaaatggaaaatggtaactgaagtgtgctcaagctcgaaaagaagggcttaaattgaaatattttttttcgagaggagaaattagcttaagccaaataacttttagcttaagatgaatcaagacagaacacattattgcaaatttgaagaatctatttaaacctggaattttttacttaagtagatctttattaaagtacagatttttaggaattctataaataggtgtgtgttcctttttttatacccagccggttttgctttgtaaaaacaacctatttgtgtaaaatagattgtatcaaacattacatgtatttcttttaaaatattgttatgtatccatatttttcttttatgttagcctatttatttctatactttatgcttattatgaattggtcatttataatttgatttttagatgagattgcgattgaaattttttttatcttaagttgtggtaaaatgttcattaaatctcaaagttaggaataaaatgagagctaatggttatctagtgggtcattcagcttaaaacaaatttatttattaaatgtataaaggattaacatttaatggagaaacttagatcttttcacttaaagaattagaaattaaaattttgtttttgaactatgacattaaatcataaagtgtaaaaataatttgattcggtgaaatctaactctaaggatcttcatcatttgattttcatatcattttattgtgtgtttatcaaaaaatattataacttgttactttgttttaatttatctttattattgaatgctatgtttaaatcattatcattcatttgttagtttaaatagtaattttttttaataattattaaatattatacaaattctcagagaaataatatctcttatttactaaatattacttgacaacttatagacggataaataaagaattaagacttttctctgcacatgatcgactataatgaggcaatactattaatcttatatggggacaaagtataagtagtaaggtcttgtcagtttatttaattagtatatatgcaaaagcggtgttatttctattttcgtagagaaacttagtagtatattattcatgagaagatattgtgtacatcagaaattaatgatcaaagaggaaaagttattgttccacattgtcataattaagattaaaactttgaccttaaaacaatcaatatttgtatgacgcgagggggaggcagcttctattatcagtttatttaattaactcataattaagttttatccaatgtatgtccacttgaattatttgattcttttgcatattcatattcattttttttttcatattcttatttaattctcttttagtccctatagtttaaaaatattattttagttcctataatttatattttaattttttttaatttttatcatcaaaatatgaataatattatcaaatacaattaagtacaaaaatattaacaaataatttataactaatttatcacaaaataatttgtaataaaaaaataattgataatttataactaatttgtagttaattatttttatatttttttaataagaattaaaagatagttaaaataaaaattataaaaattaaaaagatcacttttgaactaaaagattaaaaaaatatataaaatataaaaattaaaaatatcacttataaactatagaaaataaaaaaattaaaatataaattataacgaaaaaaaccacttttaaattggagaaattaaatatttggtgtgcttttaagtgtcaaaacttgaatttatattttaacgtaatcacatcacaagataaattaaaaaaattagaagtgtcataactccgaaatacaactatcctagcctagtggcattttttattgataaaaaataatttatcgttcatgggcatagttaaatctgtctaataaggtcaagggatggaatttgtctatgcaagcttacttcaataagaatgtttagcattaattaacaatctacttggcataagagttcaactgaccatatatattaattaaaacactcgactcgatattaatgccagctgatcaaaagaaggtaagcaaactgagcaggactgcatcaaattacttaatcaatttgatgcattattaagattcttaaaagttgataaagaaaaaccaagtgattcaatcttcaacagatcatggtcaagtcaagtggtttgtatttaagtttttaatgtaagaacattttttcattataaaaaaaattaataagatcatttccacacgaccttaaattagctaggttgacctcaactttttttattagagctaaagtaaatttaatattaatgtgacagtcttttccaataaattatgtgtatactacaaaggaagcggcacttaacgttacctaactccgatgtggaatgccgatggcctttccagtacaattatatatgctacacatgctttattaataatccccaagtgttttcctttttaattgcgtaaaattagtgaaactgatcaaataatttcatttgactttcaaggaaatatatatttaattgatgactatctaagagttttaaaattaattaataataattcgattacagcagtcgcctgccaatatatagtatgctttacatttctacattatttatttatgacgatttgtgcaaattgaagaaatttaatataaattaataaaaatatatagtagttagaattctcttctatttaatttttaagaataagtacatgaatcttctttgaatttagtaaatatgataaactctacttatttcaaaacttacactgcaccttcgtttcttattcgttcctttgttatttttaaggatactatgtatatagttcatacataaaataaaaaaatacgtttactttttttataaaaaaaaactggtattaaaacattagaataatatataatttttcaatatcatatatatatatatatatatatatatatatatatttgaaatcatgttgataattttttaatagtaataatactttaatataatttttaatataatatttataatttaaaatataaactgtgcataatattattatgtattttcattactaagctaaatcattatttttccctttttttcggtacaataaaatttaggataggggaggaaactacaatccaagaagaaaaaaaaccttcaggttcaaaaatcacttacaaatgtgtacacttacagagatagagataaaaatattaaggtccaatgtttgtgttacgaattcagctttttggaaaataaccaaaaaggaaggcgggcgtaaggtaattttggaatttagtaaataaagttaaaagagctgcagaaaaaattgcctaatctaatttgatttttgagggaaagatttctgtccggcccggtccaatggaaaccggatggtataatcagaccgagttaattattagatgaattatgcatcttctccaatcaaatccaatcaattttaggtaaacttagcgatccaaccaattgaatcattgacccactagttcgattatatcaataatttcataactttgattttacatattgttgagtacggtggatctacaatttttttttcttaattatcaatttgattactaaattattttaaaagattcaattcaatttttaaatttttaaaagatttaatttttagttctcaacttttttaaaaatgtattaacttggttatttttgtccaaataaaaggttagaattatgaatttaatggtttttatttacaaataataacagtttttaaccgctacttattttttttttttataatattcactgaaatatttgaattcatttatcaatgattttatgaaatatttgaattaatcattacatttatgcttcaatgaaatgaatttaatgttataatgacaatgacatcaagaatcaattttcaataattcaatccattgatattgatcaatcatattgatcaatcttagtaaactgtttttttttaaactagacaatgaagaaaagtaaagtttaattttgatataatattaatacaaacatttttacccgatcaactaactataaccctagacaagacttgaaataatttaatacaaaattcaacgatcttcccatacatagaaattgaagatttttttacagtaccaaaaaacttttacgctgtcaataaattctaattacattcaaaaacaaaaaggaaaagcactagccacagaaaaaaacaaaaggaaaatagtaaataatttattttaacaaataagtaaataattaaattaaagatgagtttctaataatgatactcaatttctcaaacaattctgtgctaccagatgaagacattcaacacattttaaagttgagaaggtagcacagggctgtgtaactgcctgcagtcttgagaaaataattgcaagagtgatccctatctgttccattcattgtctgctccatatctggggttggtactattcacttgactatatacctctggctttatggagtttccaaaggcattccaacctagaaggtatggcatgatacactgcatagacaagaagcataagtacaatcaaaatgagcaaaatattaatcatgttgagtgcacaggaaaattggaatcactaaaaaaaaacttcgtaccccattacccagaggctcttcgctatgcgaaggtatgggggagggatgttgtacgcagccttacccttgcatatgcaaagaggctgtttccggaaattggaatcactaaatgaacaaaaaatgttgtggagcaaccagtttttaaatgctatatcactttattgaataaacataaccaggaacttttctttccaaattacaaattgtttgtctgacagaaaactataaaccttgaagatttcatgacaactaatttggctagacaagtaatttttttgactaaaaaactgagttactattacacagaattttacagcaagagaagtttgatctcttcttctgtgcaatggaaaaagactcagatctataatgtaagcaagtaaggttgtatctacccttgaatttcagtgggttaagatacagtacactttaaattaaatcatgcatatacactctcacagccttatcttgttgctactatatatattcccattgcattatcagagaatcatggcaatgaacattctaccattagaggagagagagacagagagcatacattgaaaagtgaccttaaaacttctaggtctgcccttgtaacagggagaaagatgctttcctgaattccctccatgttcgcaggttttttcagaacgcctttgaaaattcacacaacaaagtcagaactttttttttttgacagacaaattgaatcattttattaaaaaaaccagcactgtcacaagttgtgatacaagctggctgcaacaaattacaaatgtgtaaagtgaagcaaaaaaaaaaaccaatacaaataagatctaagctttaatcaaaagcaagtaagactctaaaaatttactctgttctccattctgctaaaatgcaccaatgtagctccacaaacaacatatgtgccatataaattatatggtgtagctactatgcaaagaaacaaaaatggcataactctgcatgataccgtcatcaattatttgcatcatactgcacctttttcttatcttataaaaaaaatgttagtctgtttatgtggcatttcaaaatatacggacggaatacattccccaccaccatttatctgtctccaaaaccacctgcgccccgtctgtttgatgaaaaacctccaaaccttacaataacacaccaattccaaactgctgtgaactttccagaaacacaccttaaagaagatttcatcatcggactttttcctaataataacaagataaaagaacaaacttcaccctccacacactgaacactccaataccaaaaaatacgatacctccttcaccatttcttttactccccatctcaccaattactttttctgcggtctcttaactctgaatccctacatccaccccgaaagaggatatgtcaggctcccccttaaattgttgcactgccatgaaaaaaccttcactgcctccaccagctttaatgtttatagcatttaatatttttcctttatattgcaggtattggcataaaaatgggtaagctaaaccttgaagtgagtcatatcactgttaaaatattgcatcactaagcaatctatttgcagtttacaccaaatactgatttgtgaactgaatcaaaccggaagtacagagtatcctaacaacttcaagatggcaggaaagtaaaatcagaatgataccaataacagaaacaaaagtttaagaataaagagaattacttaagctaaataagtggccagtagcatccagaagtggctccaccttcaaaacttttctaacttcaatttcgttagtcataggatgaaaaaataaatcattcataaaatctactatgactacttgataatgtctgctcaaaggctcattcaaaaaatacaacatcaaaaaccttatcctactatgtgaggtcacctacatgtctaacccaaggctcattcaaaaacaaagattaaatttccttaattttgtacataaacaaaatcataaacacatagacctgcacatagacctgtacataaattaagtggccagtagcatccagaagtggctccaccttcaaaacttttctaacttcaatttcgttgcttcataaaaggacaatttccaaaatgatttaaaaggataaaataataccgccattacttatggcataacatacacacatcccaaaaaaactcaacaagtacagtggatactgatttagttaattcacatgaatcaacatatatggtcatatcacatgtttaatttgtttcatggtttgaagacaccatcagatacccttctcacgagaaaagaaaatccaatttgtatcgcaagataaagcaagcaataatcataaatttgtcaatatgctgatatgttggattgttcattaacaattactagaagatacatcacagaaactaccttttcgacttaacagtctcatgagaaaattcccaagaatcccttgcaccaaggataattagagttcccatttcactcactgatagtgagaatatctgcattcaagcaaagtgggcaattacctcacgttttaaactataagactatgttcaacagaatcataaattccaacaaaatcacatttgtttttctttttggttcaaggtaggcccatcactgatgggccttgggggaagcccacaagaggtctcatgaggagaaggggagagagaattgcaaggtttgaaattgaacctgaacagtccttgcatatctcatagctgatagctatacccactacactgcctcaaaggaacaacggaatcatatctttatttttctcaaagaagggcaaaaaatcatccagttgagttggcaatgagcacatacagaagaatgaatgcaatagacaatgatattctgatgaattgctacttgttagtcattggatgaaaaaataaatcattcataaaatgtactatgactacttgataatgtctgctctaaggctcattcaaaaactacaacatcaaaaaccttatcctactaggtgaagtcgcctacatgtctaacccaaggctcattcaaaaacaaagattaaatttccttaattttgtacataaacaaaatcataaacacagagacctgcacaaataaaatattagttttacagaatgaccttgtcttgaactccttcaaattaaagtcacgcctattctaaattaagtctaaccaatgtgtgggtttctctcaaaatgttcattttttgtttcacaccaccactaatttcttacatactaaaaattttcaatcacgcctatttcttacattttttgttcattttatatatacatcatcaccgcacccacaccaggactcctcgaaccattttcaacagcagcctttatcacgactttagaacctcctatcacaatttcaatcctgaccaaactctatcacatccgtggaggtactgttgaaatcatccccccgaatcacacctccaatttcatctctcataagttaaaattagcttatatataagttaaaaatgagcttttagagaagctagtatgggagaagttaatttcattttttactagttagtttcttctctcgtaagtgcttgtgagaaatttattcaaacaggacctaaagtatagactccatagaggaagcacaagttaagttaatcatatatgagctcatcagcaccaactgagggagcaaactggagcacaacataaccttccttggacactttgaacgccccagactacaaaacaaacaccagaaccttccataaccaaacattaaatctacaattccaacacacaaaacagaaaagaaaaattagaaattcatagcaaacacttttcgattcaagttctggactttataataccgctaaatgcataataaactcatttttttctagcaatgatgacatagccatgacctggtgattttttctaacaaaactcatttttttgttgtggtattttgagaggaattaaaccaattcaaagtaaaaacgcaagctccttgaaagtagtcacagaagctccacctacaaacatggtgttacccagcggcaaagaacgatgacgatttttttatgtgtaatttctctcttcactcttggtgtttttgttgggttgttttgttcttcatcggaggcgtcgttgtcggtgattatgatccaaaagagcttcctttggtttttgatcttagttttgcatagtgggttatcgtcaaaatggaaacttgggattgtgaggttgctcgatccattgaagattaagggtttgagcaagggaatggaataagaagtgtggaggaagaacggaattgggacttgggagcggagggagggagaacgttcacggaagccgcagtgtaagggtaagattggaaagagagaaaaagtattcaatactttatagttaaatagttgactcgtgtcattttaatttcttaataatcaataccctaagcaaaacccttattttaatctataattaattaatgctactttaaattgtgaactttctctcttctataaagataaagattgaaaaagatgaatatagaaagttcactttaatgttaaagataaattttgatgctaaaacttaaatagcttaaatatatttaaagtttgtgataaatgattaaaattttatataaatttctaataaattttttcattagtataagtctttcatgcatgaaaatttttattttaagtttttgttattaattaagtgataacatattattttataaattaatttttttaatatttttagtgattctaatagatgtcatgtcattacttaattaataatataaatttaaaataaaaaatttaaatattaaaaattcaaaaaaatattaaaaatctataataaaatttgattatttattaaaaattcaaaaaaatattaaaaatctataataaaatttgattatttattaaaaatctaaaatatatttacatctacttaaattaactaatttttaattcactgtgtcttattatggatggggaagaaagaagtatatataaggtccatgaagatacgatggctgcagctacgaacatgactattagtatagtatacgccattttctttctcatttaattaatttgttggttcacacgtggtgccgctggcatattttccacacgctatttttggttccgaccagcacggaacactacttctgatatgatatgatgcatgcgacactccattatgctcgttcgttcgtttcgtccgagtttacggacattattttttcactattcatttttcatttaatgggacgtaaataaatgctactaatctgggattattattattattattttgaattctaccttaaaagtgacaacaacactctagtccattctttattaataatttttagttggagtacaaagccaatgtaactaccttcattcctcctcctcctcttcttcttcttctcatttgcttgcatagcaaaacaaaccatgtccaccgttgcattagagactctcttccctctttgccgtagaaaaccttcatttcaccgccataaaccaatccctctcagacccttctttgtgacttgctcttccaacctcaatgatgatgcatccttcatcttccaccaacaacctcgcaaaactctctctcccgtgcatgcagtttcccacacagacacatctgtcctccactcccttcaatgccctcacaccatcaccaacactttcctaatcaacacaaccgaaacggtctcaaatttcccttctcattgtatatatagcagatatatcattatcaccttgttatgggaatacccaatagggaaaagttttgttttttctattttcaggaatatgcttggataaaaaatgttgttgggtgtcctagtcctagtttttttttttttttttgagaaagaaaaaagttaaaacttttgaatcagctagatccattttgttattgaatttaggttaaaaggaaccaccatgcatcaaaagacaaaaagggtgtcctgattttacttttgttttgttatgtctttacgtaactaacatgttttggtgtttggcattgatggggttaatgtttgggatggaacattttaggtggagggaaagatttttgtgagattagatcacggaaagggtttgagggatcgggagcttacggtgggttgcaatcttcccggaaaatggattcttcattggggagttacctatgttgatgatgttggaaggtacatcatgttaaacaacaagcttgaattctctttgattctggttttgagatgccaagttattatgttttttatattattgaagtgtcgacggatcttaataataataatccaattaagttttatatataatgatgatgtaagcttgattctttagggaatgggatcaacctcctcgtgatatgataccccccggatctattcttataaaggtagacaatgactttgtgactattcatgatcacatgtggcacatgttcatattgccatgcagaaagttttgagttggaagtgaataacatttcaggactatgcaatagagacccctttgaaggagtcatccttatccgccgaaggagatacgcttcacgaaatcaggattgatcttaaagccaacaatggaattgcagcgattaattttgttctcaaggtttattttctaacaatttagcagttgagagtgcataaaaagaaggcattgattgtgagaacgttttgactgaacatttttctctgcttcctaattcgggtggccccgttgttgattcaggatgaggaaaccgaagcttggtacaaaaacaaaagaagagatttcaaggtttctttggtcaacaaccttaaggaggataatagcataattggacctaaatggggctttgatttatggccaggttttacaaatcattactcagtggtttatttgcttctgtaaagaagtctatcttgtttatcttttcaattctttaggagtgtcaaataaaccataaccttgtgatatacacagtccaagatttgtgatactatttttttcaatcatagggaatttgggacagatatctaaaatgttcctccagtcagaagaagctgaccaagatgacagcagtgaatctagagttccagagcaagacaataatcaaccagaaagtttttgtgaagaagtgcctataacaaagaaggttttagtccaaaactctatcagtgtctccaccacaaaatgccatgagtctggggcagttaaggaacttttacttttggaaactgatctacctggagatgttgtccttcactggggagtttgtagggatgattcgagaaagtgggaagttccacctcgtcctcatccaccaggaacagtagcatttaaagaaagggctttgagaactcaatttcgggtataaaactcacaaatctgtccttttttttcttttttatattgtataagttattgaaagtccttcatgcttactaacaaccaggtcctcttttttcactacatattcttttacaaatattgatggttttaatgccttcacaaatatatttagaattttagattatgactgaatgcatggtattcgagcaacaattcttttaagagtttcttacttgctcttccccttctctcttttgggacaaaactttaagtttggttatcttattttgttttatgatatatttacctattcatcctgttttgtagccaagagatgatggaaaaggatctttagcactaatcactttagaggaagaattttcaggctttatgtttgttcttaagcaaaatgaaaatacttggttcaagtacaatggacatgatttttatatccccctctcaagttctagtagctttcttaatagtggcaacaaagagggccagtcagaaggtatgcagagggaagtgactcaagaggctagtcaaaagagttctttctttgcatttactgatacaataaccaatgaaataagaaatttggtcacagacaattcctctgagaagattcaaaggacaaaatcaaaaatggcacaacgaagcatttttcaagaaattgaaaggctggctgctgaagcctataatatattcagaatctccattccaactttctctgaggaaactgctgcagaacctgaggtaactattgtggaacctgagacaagtattgtggaacctcaggcaacaactattgtgatacctgagacttcagtggaatcagagacacagtccctggatccaaaaatatgctcaggaacaggcacagggtatgaaatattatgccaagcgtttaactgggaatctcacaaatctggaagatggtacatagagcttaaagaaatggcttcagaactagcatcacttggtttcactgtggtttggttgccaccacctactgaatctgtttcacctgaaggatacatgccaaaggatttatataatttaaattccaggtactagattagaagcattccaattatttatgccaatcttgtcttaatactttgatttgatagaaggttcagtgttaggaaaattgcttatgttctacagtgcttacattcagcagcatatgctatatgatggactttcaaatattttcagctgctggtttataataatacatgagaaaaacaaaaaaaataattaatctcaaagaatagataacagtcataagtcatcatgaaaaggaacttgttcatatgaattattacaattttgtttttttgaaaataaatatcagatacggaaacattgatgaactgaaagatttggtgaaaagatttcatgaagttgggatcaaagttcttggagatgccgttttaaaccaccgctgtgctcactatcagaatcaaaatggtatttggaacatatttggaggccctcttaactgggatgatcgtgcagttgtagctgatgatccacattttcaggtttgtttgtgaagattttggatgtttgttctgtttcattgttctttgaaattaaaaataataatcataaaacagaataagataaaaggttttctactttttttctataacagtagttcatgccttaacattttgttcattcataattttcacactatgatattgttactttctgtgtgaacctgagaaaaaaaacattgaatatcctttctaacatacagggcaggggcaacaagagtagtggagataattttcatgccgctccaaacattgatcattctcaggagtttgtgagaaaggatctcaaagaatggttatgctggttgaggttgatatttttagacccaaattttcttcagcttattcttaacaaaagaatgttttgtcagtttgtgagtagatcataggttctaatcatatgatattgagagtaatggtttcactgccaagatggttatgctggagaactaagacattctgtctagactatagagaattgaagttaaaatcatctctaaatttttgtagaatttcatgtttgaagctttatgtttcagactttattagtagtacatgacttggcaactaccacaatgtggcttaactaattacaaatagcgtctcgtgtacggagtttgtaagtgtgcattgactgcttgatgctaaaacaggcttaagttatagccgattgagagctaagctggttccatattatctcatatttgtgttgttgtctttatctttgacatgtcctggtaataaagatgccagtccctagtttgtgtaagctatatagcttgtatgttcaggagatatcagacaaaagttatcaagtgttttgtgctagtcatatattctttgttaaagactcattttatgcaaaacccttgtaacttggtttgcttgggggaggggggtgctgctttgtgatttattgaaagcatgagagacaggaatggaaacttaatattcccaaggaattgccatatgctttatggtgtgattaaaactaatatagtgtcttacagaattgtatacttttctccgtgaccttcaggaaagaagttgggtatgatggatggaggcttgactttgtgagaggattttggggtggttatgtaaaggactacatagatgcaagtgaaccttatttttccgtgggagagtactgggattccctcagttatacatatagtgaaatggatcataatcaagatgctcataggcagaggataattgattggatcaatgccactaatggtacctctggtgcatttgatgtcacaacaaaaggaattcttcaccctgtaagcatcaactctggtacatctttttcatagcatttgttcacatttacatattccatgtacctcttacaaagttaaacgtattttgaaattgtcactagtttcatttattttatggaatttgttgagattttttaggtgggagtaaaggtagtatactactgtgtttcttatgatttttttatataattttgcatacataattaattttactgttagtgtaaagtgttaactcttctggggaaataatgtcacactcattgttacaagctgcttgttgctatgcctaaaatttcatgattgttatgcatgtaaagtaagaaaatgaagatatattagccattgctttaaagtaggttaaatttatgagattctttaatttaaatcaagggtaggtgcacactttacacacttgacagtttacacattttcttcctttagtgaagtcaggttttggtgctcatctgctgattactctgtctgtcataacatcacatatcttgttgctataccagaaatatatgcaatttactgatatagtgatataaacaatcttacataagaaaccttacattatcctcttaattttttccaactaaaacctgtacctcttgtgagaaaacacaaatgttcttgcaataacatgattgctgttcccatttattctttaattgtgaaatgttaaattctttctcaatataggcattggaaagatgtgaatattggcgattgtcagatgagaagggaaagcccccaggcgttcttggctggtggccatctcgagctgttacgtttatagagaatcatgacactggttccacccaggtttgaacttcttcattctaaaaatatcatgacgacatttgttctacttggtttaattatgttgaaaaaatttatcaccaacgatttcatactgaaaagttttgcttaacctgttgttaaaaacaatgccactagggtaattagatctttcaaattagccattttccttggaaattcttcagatttttagtcctctttaacattttctcttgcagggtcattggagatttcccagtggaaaacaaatgcaaggatatgcctacattcttactcacccaggaactccatcagtgttttacgaccacatttcctctcacgataaaagtgaaatagcaagtctaatatctctcaggaagaggaacaagatccactgcaggagtagagtaagtatcagaatattgtactgtgtactaaatctaaatagtgtgtactcaatattttctggggtggaaaaataagaagaaactgttttcttatcttgtgaaggcaaactaattttggttctcggcataggttaagagagtgaaaccaaatactcaaaaatcataatgcaaaatgacacatgacattccacaatatacatctattgttttcttgaccgctctctagtggtggaggttaaattaacaggaatcatatgtttagattttcttggtgtttgatatgaaaaataatgtcatgtgcatgcctatatcattcatgattgtcttattcaaaatgtaataaatgttctttaaattgtgtatatctttggagcactaacccttcctctttcttgctcaaggttcaaattagtaaagcagaaaaggatgtttatgcagcaatcatagatgagaaagtagctatgaagattggacctggacattttgaaccaccaagtgactcccagaaatggtcattagctattgagggaaaagactataagatttgggaagcatcataatcataaatcataatattatcatttataattagcactatacatttgttcctatttataagagaaaagttatagtgtaaaataaaatacactatatttacactataacttgttaacttgtttcttataaagaggaatagtaacaagtatggatatagatagtcccttgtacattctcccccttgcacattacgttgccttactcaagaataggttgttccacgttgctgcttaaggtatatataggcttatggccatgtaagcaacactaccgagaaagctgcataggctacattttcagccaaatgcagactcatctggaatacataatgtgttaattagagtaattcaattgtgatcacttgttcttacacgtattgtttcttgattgacaagcatgcccagttgatgtcagatatcagacgacttaagattaagtgaatataacaggaatttacttggttcacttaataactttgtgagtatcaaatttaatgtcttttatattaagtactgtactaagaagatctcaggataatgacattcattttaattgctgatatcttctcaataataataataataataaaggtactgtgggttcaaatataacatcaaatctcatgataatgatataaacacaacttaaatatacttttgatctttatttctatatttgacctttgtttataataaaaaaattctctatttttttcctgttggtcttcactgcagggaaattttgttaagtgctgaggtaactaatggagaatgatgtttcaagtattacgttatcaaatcatataaagtgtcacattattatcaaaaaagaaaacaaaacatgtcataaaaaagtgttacatcaacaatgttgtcaacgtttgttatttagagcaggctacacggttccacttttattgttgttactaatctatctatttataatatataaaataaaagctgaactaattgtaaaattggcacatgtgaattttagaaatcacaaatttttccatgtcaacctctttgcttatgtggcacactcctctcatttcacaatttgttatactctctttatgtcatgagtaaataatgtttttcaactgtgaaagtctgaaacaaatgtttttaatcagttactaaactctattaaaatctttcaaaaataataataccaagaatactactatattgttcataagaccatttcgatccttggtattggcagacaacaacattgatatttcctactcagtatgttagtcgatcttcagtttcgcagcaccattcccattctaccttctcaatttttatgttttatggcttgagaagaaacaggatacatgtaccaagataatgtctggtggtacaagctcaaattgcaagatcaggtgtgagcaattggcatggcataatgatgagatattctgtaattgtggcaattgacatgacattctgttatcatagagcagttttattctatcggcattacctaagtagatcatgtagtaaattggaagttcgaagcatacaactatgcgattgcagtattatggtatatgtccgtggacaaatacctgatgagacaatgttagtatggttggactctagacacaaggtctgtaaatagaaaagcctactgttatgcgttggtaaactattagcaacctaattcattctcctatcaccctcctttatactatcaatgtcatagcaaatttatgtagaatgagatattgtacttttattcttttgttattttacattaaaaaaatatatatttcacccatttacaaatattttaaaagcaatagtgtatgattgtaaaagcatgtttagtaaaggagaagatgtcccaaaatattaaagatgccccatgtgaatgatacatatggaaagttattttacattttaacatattgttttcatagaatcactcatgtttctaaatattttttctctttctcacatcactcatgtattactttctataatattattttttatatcttcatcactcattatttgttgaatctatcttctctccttttttatttcttaattttgtttcacttctcacatcacttgtgttttctatttatttcctttttcaagggttaagatgtgtttttttttatttcaacttttatatttaattgactaaagataactaaatacaccaaattaattattttactctttcacataaagcctatatataattatagtttactttctaaccaaataaaagttgaatattttaataacaaaaatgcaatcaaaataattttgtcatagttgaacatgaaagttgtgtcatattgtcatgtgtaattagtactaattgtataacattgctacaattattcctgagcaaatgatagtttgaagttgtattcaattagcagctatatatatatatatatacactaatgattattaatttgtaattattaagagattaaatttgattaaaatgtcagttatagaaaaaaaaaacgcaagacattatattttttcatcagtaatctagcattatatgcttgtgaataaggtgtcgcatatttgaaaataagaaaatttataaaggtgaggtaatgtgaaattattcatttatctatttgtaatatatcaattttgagttgcagattatggtgttcccacttttagatttttaaaaatcacaaaatctttcacataagcatttttgcttatgtggcatattttccctcagttaacaatttgttataccctctttaagatataggtgatgataatattcaggaaagttgatatcaatttttgtaaatgttcttaatcttaaatttactatttatttttgtgaattttttttgtttaggtgaaagattacacgtgaatgggtcaaaaattaaaattatactttttctttttacaccgtgtacattttctttacatctaacactttttaaaattattcctactaataaatatacggattggcaatccgtgtatgattcatacagattgacaatttgtatcacctaattttttaaaaaatatatatatttttaatgttttctaataaatttaattatagttttttataattattacattaagtaaatttttgtttttggtcttattaaaattaattttgatctataatttttttacatatataaattttaaataaaaactataggtttaataaaaatttatatataaaaaaattaattattacatcaaaattaattgtcacaaaatttattatgtaaacttatatagcattaaatatatattaaaaaatttagtgttatatacaacgacattaattatatatagctcaggtagttagactgttgtgttaataacgcaaaaatcatagctttcaaacctgagttgttgttggcccaaattttttttttacacgataaaaattgaacacatattcctccagtgatggtggaagtggataaagaaattgtggccgggtttagaaaacaaactaaaactaaataaaaaatcaactaaaatgaaattttgaattttatgaggataattttttattataattttctgagtaaaaaaaacatttttaaaatggcataaacaacacttgtcatgtggttggcatttggatttcaatctagcaaccaggtaattacatgggtatatgtggcaagtgttcacatagataaaagattgatagttaagagattccatttaatgccacgaataaaaaattaagaccaaaaatcaacaagtgataaaaaaaatgctaaggaagttgtgagggactaaaaatgaatttgcttataaattttaagagacaaaaaatattttaaacaaaaaaattatcaaaatgatttctttttagtttatttgagtgagcttcatatattacaatttaaaaataaattatcgaattataattaagcttttattaagcaagtttgcaaacacgtacgaccattatgtctaaacaataaaatgagctgataatagctagcttattagttaattaatcagagggtcaaaatccatgtatccacaaagtgatttgatcaggtcaacatatatcctatctcaggtgatatgttaattttaattaaaaactattttgacattaaaattatagtatcaatattatcaaaacataaaatgttcttgttataaattattttgtagttagaatattatgtgttcggctaatatgtacccttttcacaataataaaatgttacactgattataggtacgtagtgtcctaaggatcaatcatcgcatgcatggcaaaatcataaatatctatttcaagtgcatgcatgcattatcaaatcaatggtttatatgagctttgccttcccctggcaaggtagaacaaacaatattatagcaacaaagtttggttggtagatcaaccatcatgtttatagggtgaaaaacaaaaattacccgttaattttccttgatggtcataataaggaatttatgtgcattgttttcaatgaattgaaatgcaagtaaactggatttcagtatttcacaacaagttttctctctaaatatatattcattgatagaggttaaccgtaaatccagccaattttttctccaaattcacccaaatataaactattatgtcaattggcaagtgcttcatagagcacttatatatagagagatagttttgtactcatttcattgccggagggttcttaacctttcaatccattcggctgaggttaccttccccttggccataatcacccaaaaaataaaaataaagaaaagaaaagaaaaaagaaccttcatggcaaaaatgcataatttcttccttttaacgtgtttgatagtcatcatacctaccttgcatgccaatgtcaaggaggatgaaatatattggaagaggcaaagtcaaatacttaatgattcatattggaagcaaaaagcatcagttgcagaaaaagagaacaaacaagcttatacttctgacccatattcactcaccaagaacttgacctatagtgttagcgagtgagtcttataaattttcatattagtgtcatatcaagttctatttcatgagaaaatgttcacatatatattcattttcaatggtgattatatataattttttttttatctctagtagaataaggctttttattcctgtttgtttcaagtcatacaaatttattctaaggaatgttatgtagttacaaaacatgttgatggaaataatctttccagtaacagtattcctaagaatatcattcccagaagtataatttaatttagtttgggaaagaaaggcccccttatatttttctgtttgtttgacaaaacagaatcatagttggtgagcagaatggaagaaggaatttgaagggaaaaggtggtaattgtatggcaacaaacccaatcgacaggtgctggaggtgtgaccccaattgggcaaacaaccgaaagaagcttgcaaattgtgtgcaaggttttggcagaaacactgttggtggaaagaatggtccattctatgtggtgaccagtaatttagataatgacatggtgaatcctgttcctggtacccttaggcatgcagttacaagaaccggacccttgtggatcatctttgctcatagcatgaagattaggctcaatcaggagctcattatggcaagtgacaagaccattgacggaagaggagttgatgtctaccttgctggtggggctggtattaccatccagttcatcaagaatgtgatcatccatggagtcaagatttttgacattcaggttggtaatggtggacttattatagattctgagaaccactatggtttgaggactatgagtgatggagatggcatttccatctttggctctagcaatatttggattgaccatgtttccatgagaaaatgcaaagatggattgatagatgctattcagggttccactgctattaccatctccaatagccatttcacagaccacaatgaggtgattagttaatttatctcagttgtttgtttatttagtccctccatacatgtttttagtccttttattttaacagaaacacatgttttttaatctttgatgaggaactaattaaaaccacatgacttttgataaataaagagatcgactaaaaacgtatcaaatttttatagggactaaaatcaaattttgcgatattttgatgaaccaaatacatactttatcctaatttctttcagttgtgtatagatttttaattccaggttttgaaagtgaaaatgtttccttgcctgattttgttttatgtgatgcaggtgatgttgtttggtgctagtgacagctatgatggtgatacgataatgcaaatcacattggcattcaaccactttggcaagagattagtccaaaggatgccaaggtgcagatatggttttgtccatgtggttaataatgactacactcattgggaaatgtatgccattggtggtagcaagcatcctaccattattagtgagggcaacagattcattgcccctgacaacattaatgctaaagaggtatgcatctaaatatatactcatgctcctccttacaaataatagaatgcatcttttctttgttgatcattttttctcctataattagtatctcaccatgataccatcttagaaagagaaagacacaaattgttatacattgattcatcgtgactaattgtaggatctagtagttaatttatatatatatatatatattaattggaccaaatgttgttattcaacaacaaaaattaagaatctaaaccttttccccttcattttttccaatttccctcttaccaagcacatcttaaactccaatgaactcagagacccaacaaacaaaattatattgccgtgtgtcatttgctcttgactattatggaagatagtattacttttctaatttctttggccttcatgcaatatgtgtgtgagtgtgttttgaagccaacatgcactaattataagtactcaaagctaatattcatttggtttagcattgatccttagttaagtaagttcatttcctaaactctaaatgtcaacacctcatgcatcacatgttcttgactaaataatccacatgtataagtgaaggatagttacaaacaaagaaaccacaaagaattcctataaaatgttgctagttttttggtcttgcattactctaagtaacatacaaaatgaaattgatgaaactggaatgtagaccatccaagagtgactcacataactaatttgctattttggtgttggtgaagataacaaagagggagtactcaccagagcaagagtggaaaagctggcaatggagatcaatcaatgacgagtacctgaacggaggatttttcagagaaggtggtgctcaactaacagacaggccatactcaaggcatgacatgatgacagcaaggcctggatcatacgtgggaagactcactcgttatgctggaagccttaagtgcatggtgggaaagccttgttaattagtagccatcattctttggaaaaagagagaagagcaagacaagaagaaaccgagcaatcaaatcaagatggtggcctctgtaatatatcatacctttgtcataatttttccttagtttgttggaaagaaaatatgttagttcatcacataattttattaaatggagatgtttccctgtattagcatgcaatgtaagctatggtgtccatttgcatacccatacatgtatgtacatgtagatatagacaaatagattgttatatagctgtatttggcaactggtacttggttttagttgtttatgtatcaatgttatattaataactattaataaagacaattattttctttgatgtatacattttttatttctaaattatcttttaatatataattatttttatttctttcataaattttaaaatataactattgttactattttcttcaactgttatttattttaaaaatatagatagagacacgatctcttttaactagtaacaattaaggaaaatcacagcagattaaaaaattacaaataatttaggctaaataccacttatagtcctttatttatttatttaattttaatttgtacttttatcttttaaaaaattcatttgagtctaatatgctttcaaaatggtttattttttgtccgtaccattacaatgccaacggaaaatgtttacagggatcttcttccccaaattcagaaattagggttcattttgttggttctgcaccaaattcccaaatcagggttatatcagcaagcacacaaattacaaaaaatgatattgttctttataaagagctaaatgctaaagatgattagaaaaagaaaaaccacagatcaatgctcttaagaagcaaaacataacagaaattcagagaataacaactctttaaaacttggcctgctctactgaccatttattccgtaagctttgttggcataaagcaaattttatggaatcggccacttacacattggataaaatgaaacactgatggggttgccagaagatgcccgggaccggtggggtgtggtggttttttggtggatcaccatcttcggttcaagggggcttttgcttgtcatttagaaacccattatgtttttttatgctgaaacgatggcagccatcatcgctattgactattgagtttggtgtcagcaaccattggtcttggctatggccggaaacgaattctcagctttttgttcatgcattctctcatccgatgatgatagttggttggactctctacactggatgaataatataaagctaacaactaacaatgagtttaatttgactttttggagaattaacttgggtcaaaaattgattttcgatatatttttactttaaagaagaatttagaattgattgattaagtacttttaaggaacttttgtgttcaatccaatattttgtgttagaattttacttctaactattttataataaaataatcacacataaattacatcacttcaaaataattttaatcaaaatcaatttccatcaatgcaagagacaaatcattcactaatatgttaagacctccaatataatgcttgatgtaaatttcaatcgggatttttgtgcctttcgctcctatctctattcgaacaatgcctttcagctccttgtgcttattacaaaatcaacttcattcaaaatcaattatgttaatcctcatgtaaacacactaactctaatttcaaaagtactcatatatatggccaaggcaatgtttgtaccaatatatagacttgtctcttttggtacacaatatttaaggtattcttggtggaattcttcaccttctttttgtttctaagaagctccttatgtatagatagaggctttctttttatagacttccttaagttttgtccatgatatgatgtggccctcgtgttttgtaattgtttttcatcattaatttattctgatatggatctctttggggttgtaagaattggggtaccatcatagttgagaagtccatctctccttccccgagattcatctcgttttgcttaaaaaaaattctgtaattgaaacaccaaggcaaattatcaacaaactcctccttgccttagttattgtggtaccccaattatcaaccattgtaaagtatttaattttcttatcattgatgaactttcaactatttcaaatttggtaagcaatctttcatataattaaataaatttggttttatcaacaactagtgacacaagtaataacaacttaattccttagtggaggctattttataccagtaccatgataaaaaaaatgaatttgattgattataaccgaataatgattttgcttaaaaactcctgagatttatatcaaaacatatatttttgtattaatgtaagtgctaaaaattcgccatgacacgtttcaattttcaatatagtacttatgatcaaatcttaaataattagtcccatataaattttacaaaataaaaatgtcaagaaaatattaacattcctcatgtagtaagaaggtgcgattgaattgaaccagagaatttgctgccagttaaaattaggtaaaaacaatgaaaacctgtttcgatttaacttgattaccaattaacatgaatatatacaacttaaattgctgactggaaacctcactaagcttcataaaaagttaacttgtataaagctgtcgacgatgttcataaatcattaattcatgatgccacatccacctcatagtcgaaggcaatcacaattatggtaaaacaaatacaacagaagtcataatcttgcacaccaaaagcatctggcataaactggtagcaccaaaccaacacacaccttgacagcaaaaagtttatttacaatttagaatcacaactcaccagcttgaatatataatgttatccagtctattaatatactatgtaggataaaatttaatgtgaaaatcacaatagctgtcacaaatatattgtgatttatggacaagtgaactgaaagtcaaagttactgctgaataaaaacaagggaggaaggaacgcttaaaaggttggtaattatgatttaagaccttgtcatcaacgcttggttgaactactactgcaaaatcaaagcatgtttgaatcaaaaatgcaaacagattgagcataggcacaaccaaggaaacaactgtcaggatcaaaatttagaatgcccagcatgcaatgcgttcttctacatagggagaagattcaaagaactaaaaaatgagctatttcaaacctccacaatggccttcacagttgctctagtttatccacaccatttggcatgatactgtctaaagcagacttgtctaaaccggacaaagttttagcaatgccattcctacaagacattaatgttaggttaaccagacgacatttaatgctggattattaacattaaatgcttgcagtctcctgtttttgtaacattgcacttctgcataaataaaattgccatcctgaggaaaacaatgcccttcctacaagacaaggacttcaaccctaccctaaattttgttttcaaatacaaaggtaacattaaccaagcaacatttaggcagtcaatgagaagacccaaggttatagaaaaatataatgccccggaaatttatataagtgagtttagaatgcacagcatgcaaaagattcaaagaaccaaaaatgagctagttcaaacctcaacaatggccttcgttgttgctctcgtttatccatgccatctggcatgacactatctgaagcagacctatctgaagcagacaatgtttccgcaatgtctttaagaccctgcaagtgaaaacagaatcattgagtatattatacgaaacaagattcaagttaatgaatagagtgggatgccgtatcacatattcctatggatataaatacaatataaaagcatattaacatattacagccaaattggtttgaaaacaaagcacaacgtagaagaataccattagatttggagttcctttatatgtgatcaaattaggggacttccctgaaagtttcagttgctcctgcagaatatttactcatcaacatcagatcaatatctcaacaggaatataaaaagatataattaataactaagccaccataaaaatgagaagatctgaaaaaggtgttgtctactgtaatttaaaagtcagcaaaccaaagtttcttataacacttgcagctgataatccagagtccagactatataaaatatgttttttatccctgatatatatccgaattttgtgtttgatccctgatatttgaaaagttttgttttagatctctgtcgtcatttaagtgatgacatatccgttaaatatttgataatgcaatttgtgaaagctcaaaaaccgtcggtatttgtttcaaaatcaaatttaaatttttttggcagttaaaaaccttcataatcaattaaaatcaaaacaatccaatggcccttgatcacctactagaactttctgcttctctccgtttggtgcttatgcgaggacaacatgctccctttcaaagtcatcaacaacagcctccatgtcatcagcgccaccgagatcatcctcctcaccatcaccgaggagtgctccactttgcaggaactcgaactgcagcgctgcagcgacaacattctctgcgggatcgccgcatgtgggaatctgcagattctgaagcgaccagatctgatccgcaatgcctcctccgactgccaccaccactgtctaccagatctggccacatggaccatcgcgccactacaaccccacccttcacctacctcgccaactccatcaccaccaccttaactcacccaaacagcacccacaagtccagatctgagccaaacaccaacacccaaccccaacaacaacagaagaatggtggagacctccatcttgtaatgggttgctctctctaccgccttcgttctccatcttgtgcgcatcgctggtgtggtcagaaagcatgacgtgtgcaacctctatgaacaccgcaagagcgacttctccctgtgcagcgatacgtcactccaacagccattacgagcttcatgctctcaaccaagatctgaaaatgacatttcagatctgcaagctcaaggtttagatctacaactcacggttcatatgcaaaaattttacagtaatggtgaggttgaaccagctccaagggactgtcggcaccaaagaggaggaaaaagagggcaatggtggcaagggaaggggaaaaaaacttgaaaacgctgtgtcaccaataatcacctccaatagtggcgaatggtggtcagaacctcgccttttccttctcaatgtttgagatatttattttttactctaattgactctggtagttcttaacagccggaaaatttaaatttgattttgaaacaaatattggtcgtttttgagccgccacaaatcatattatcaaatatttaacgaacacgtcatcacttaactggcgaaagagatctaaaacaaattttttcaaatatcagggaacagatccgaaggaaaaatttatcagggataaaaaacatatttaagcctataaataatataatttgcatatttagcagtcacgggtaatttgagagtgacaaacaacaaaagagtataattacaatttacaactgacaaatataagaaacaaaccccaacctgcaacaattcaggctttttctggctttttccgtgtacatagtcgatgagatatgacaatccataatttgcataatcctgcaaccacaacgaaatcagtattttctttagctgtatcgaccagagtgacaattctcataccaagatcttacatgcataccaaatcattctagcacttcaattttttcgaaataaaagaaacacgaatgtttatgacaatcacatatttctttccaaatttaacaatgacatgaaaaagttttacctgcttagaactcaattcagccaacctataatcctgaaatggcataattatacaacataagaataaatcaaataaaagaaatggcacacacaagcataagagtgggcacaggcaaacacacagaagcaaataaaacaactaaccaattttggagaaacataatatttactgtgacaagttgataggtattttaattcaaatgaaaatcaaataatcacggcaaagccctaaaaatacttcatattactctcctatgctagcaagacaacaccaataacaatcaactagccactgcgagaaaacaaacatattacataccaatgtttccactgtttgttgcaaataacccaagtcttcatggatatcagtaatagtacttctaactccagcaacctgtgaaagatgtatcacaattaatcacagatttgtttccttcccataatgtttataaattataatagaaatggatatggcattaacaaactgtggtttcaattcctttatcctggactaaacagctgattgaaatagcttaccaccatacctacacttgtaaaaagataggcatctataaaattattttatccaaaatatttctagactgtctgtagatctagtaatgcaggaaaaactttcagatttgttttcttcccataatgttcataaattattatacaaatgatttgataaacttggtttcaattcctttatcagtttatcatgacaacacaactaatttaaaagagcttatcagtataatatgtaacttataaaaagatagacatctataaaataaattatcctaaatatttctagactgtttctagatctgcagttagtaatgcaagaaatacttcgagcaatttgattaaagtaactaaatcaagctttagcaaaaaagttaaaaattctaagatttttgttgaatatcttttggggtttctaaattagatttgtgtgcatcattactaaatattttttccttgttttagaagtcagcagacatagactagactagcctgtcacatagactaggctaggctgtcttttccccctttctctctcttatgctttgtactctataaattgtaagctgaaacatgaatatcaagagtcaagtgagtgaaatttcctcacacttaaattcaagtattttgaattaaaaaaatatatatttgtgtgatttgaagatttttaatgattaggttcaaggcacacaaaaaggttagctgccagtttgaaaattttaagtttgaatttatggcagagaatcaatataactagagcttaatttatatggtaacaaagggtaaacgaagagcaactgtaaacatacagtagctggtcttcttcacaatataaatttagttagcaaaaatatattgaatgttctactgccaagaacagtaaccaaaacataatgctcccacagaaagaggtagaagaaggagaggtatggagcttaccaaacattatcaataaaaattcaagagttgtaaactatttagaataatgaataaatatacgaacatgataggcatgtaagccacttaattactgatcactgatcactgatcaggatgagatcaagacaacccagtggagagttttgatgccttactaccacataatattcacaaacatagatatccatcaacactgtcaaaatcaatatcttctaaaagaatcttgatccagttgtctatagagaattagtaagtatggaccggtatatatgctaaatagagaaaaaaatgcatgtaacagcattttggcatgtgtatggaaatctgtttgattgcattatgtaggtacacatgcaagcatcaaatttgtatgtggcagaaaacgtacttcatccttagttgacctttgcaactcattcagcttgagcattttgtcattcaaattctgaattctctgagtcaaatgcttcttggtatcctgccatcaaaagaattgagcggaaattataagagtaaaaaactgagtattatgacgaattcttcatcaattgatattctatgacaatggggcctcatagctttcaagtgcaataagtatgcagtgcctaacaaacatagttacataaagatataacaagaaaatcccaagtagtaaattgacacatacagcaatgacatctgaggcatgctgcaactttttggttaaatctgcaacagctttttccatattccgtttagtcacatacatgagatctgagaatgaaattccctgatattggaaaggagaaaacagaaatccgaatcacaaacaacaattaaatcagaaatattaaatggataaaatcatctgagttatgggatgaagatcatttagctacttttaaatgatagaaattagaaacaaatactgttaaaaaagaaaaatacaatacaatgtcaaccataaaccaatgaaactattcaaagaatgcacaataaaccaagcaggcaagcagttccataccttccaccacatgtagccataacccagagcacccaaggcagcagctggaacgacgagagatgataaattacctgttgaaaaggacacacacttagaaaaagcaaggtacggagcagacaaaacacaaaatctaagcctacacaatacacatcaacctcttgacagcctgtgtatgaaatacagagaaacatgaaaagtgaaacacagaatcttaagagaagcagctacattagatggtaaaatagattgcattactttgttcagaacccccattcagtactgtgattggcctgtttgatgctagctgccgaacttcattcgccaggcgacgcacctaaagcaaaatcaagcaacaatttcgtaacaaaaaaaactcaaattatcctccaaggttatttcataaacaaaaagacaccaagacgtatccaaccagttagttacctgagcagctatggcatcagcatattcaccttcaccttcagcatgctccccggatttttccaatcccttcaccagcaactacaacccaaaaatagtaaaattaaacaccatcagcatacatatattaaaaaggtaacttccagattaataaaaaacaataatccagcttctcaatcaaataattagtcataaaaacaattaaaaaaattaaaaaattacgaggactacagaaaacacacaatggccaccatattaagcctcagcattaaacaataattccaaatttgtgggaaccaaatgtatttacggtcacaactgctgataatcagattcaaagctaaagacggatcttccgaaaacctaactatctgttaaaaacaaatctcctgtaactctatcgaccgcatctcatacaaactaacactagtgtatttatacaacacctcctcaacttcaacaacaatatcacaaaatgtattaccgaaaagaagcaattgcacaaatttttgctcgtggatttaaaaaaaaagtagaagttaagatagagaagcagattgtgcttgggtgaagcagaaagtgaaggtggcgatgaaattggatatacctgaagctcgccgattaaatcagagagttttccagttttgatgaggacagtgctggtataacctgaaggaacagagtggaatcagagaagtgatgaaagtagttactgagatgtgattaagagagagagacaggtacctgctccagctatgatgaggatcttagagactccaattccgctttgcatagccatagccatggcgagagagagaaatgtgtgtgatgttggtgtgttaattgttagttaggtttggttgcactatcaaatgctttgaccactgacccaaacacaggaacaggggaaccgccttcctaaacgactgtgtttcgtttgcctctgcaagactgtgtctctactctcatctccgaattttccctttagttgtatggttctttctccaggattgtcctcgatgttaacaggaacttcgacttggaaaagttaaaccaaagataatgaaatcaatgcatgaatgacccaatatgactacaaacaccaacgtaaactttacaaaacagaaacaacaaatggccttcctacaacaactatccctgaaaatagctgcttctggtactgctctacaaggcaattttttccaccctatattttatttgttaaaataaaaaaaaattacattttgaccaaacttgtcagtatataactctcagaaatttttggtatgtaaaaccttgaaggttggcttcaaagctgttattgctggatatttccttactctgaaagataccttacaaaatctaacaatgctacagtgttttccaaaacttctacaacattttaaaaaagaaaagtagcaaacttcatttcagtttcaaaaaagaaaaaaaaaacttcattcagagaactatcgaaatatacttacaacatattgaatacttttacagaactcaaagtatatttaccaagttaatgaaagcacatcttgaaacacatcactgttaagactaatcatagcatataagataacaaaatgatgttataagaaaactaaacatctgcagagtaatacgtgatggtggtcaaagatatgaaataaaaggagaaagaaaggaagaatagttaatctattaggtttggggcttgagcactagaagaaaagggagagtgtaaaaccccaaatgaaaaacaacagatctttaacctaattttgacatgataccacctaaaagttgcatatgacataagcaacatgcatctaatagaaaaaaaaaaggtttctcaatccagataagtcatacagaagaatttgtcagagcatctccattgggaatttcttaagtggatttcttaagttactttttgtgatcccacagtgtcatgtcattgtaagaaattcatacacaattttgttccaatggtaagaaactcaaacaaacttcaagaaactcaaacaaacttcaagaaactcacacttatatcttgtttattttcacttaatcatggtgctgttatgtgttagataaatattattttttattgccaagaaacagtttcttgcagaaatcttatttttaagaaactcgttgtgacatagatttgctccaatagggaaaaaactgtaacaaacagtttattcacttaagaaaaccttcaagaaacccccattggagatgctcctcgaaattccattcccatctggtaattaactaacaacagcagaattcatcaactcaaaacatatgaataaagactcagacataaaatcccagtcaaactacaaaagatagccattttttttaggaatacatgacagcttggtaaactattttggactgacccaactattcccaaactggaatttactcaaatatagcaagaagtgtagaggcagcttagtggaaactgtctatgttaggaagaaagagaactcacggactgacggaggcggcgacaagaagcgatcggcaagcggcagcgacgacggcggcgcaccagacggagagggagatcggcgcacgagagaggagatagagagcgtgaaagggaaggggctgtgtggggtagagcttaaaacataatcatgagcgaatacctcgtgtaatatacacatacattgtaacattcttttataaatcaacataaatggtgcaagatttcttaatttgaatctttaaaattaattttaattttaaataaggatatatagatagataagatatataatagatgatagataaatttaatttgatatttagatagaatatataggtaatagatagaataaataaataatagataaactagatggataagataagtaatagattatagatagattttaattttaaattagtatataaaataatgttaaaattatcattatatatatatatatatatatatattatcatattataaaagaatgttacaattatcattaaatatatttttatatttataaaaatacttcaccaaataaaatcaatcagttaccacataaataataataataataataatatgattttattttatcttatggattaaaaaacaaaataatggatatgatgttgacacatcacatttgcatatatacttcacaaattttttttatagtaatagacaaataaaataagatagattagataaatttaaatttattaagaggatttgactaaatatggtgtgagagtcatgttaatttttctcgtactatattcaattattaaatatattgctataattataaaaatattccaccaaataaaataaatcagttatcatatatttgataaaaatgaatttaaaatcaaaattcatttaagatttaaatgaacggatatttttatcataattgatttaaatatataaatatatacatagttgggattggaaatttaaaaagtatgtaccttatacacaatatgctacaaaaatcacgaccaacaccattatctaatcgaatatttttttaagaggtagaatatatatatatatatatatatatatatatatatatatatatatatatatatatatatatatatatatatatatatatatatatatatatatatatatatatatatatatatatatatatatatatatatatatataacagtaatatctattatatattagttcataattaagtagtagtgtcatttaatttagtgaaaaagattgaaataggactatagattgcaaaccaaataatgttcaaggtcatacatgccttttcctggcctctattaaaaggacatgtatgaatataccgatctagcaatcattataacttatggaaagaattttatttgatttaatcatcttttaattttcttctacatatttttttttccaaatcaacttcatacatgccttttcctggcctctattaaaaggaagtacttggtattaatttgcttaaaatttgtgagagaaagttagtatttagaatttgcaattgcaattgtaagattggcagataacgcatcaaattaaaggttttttctcaatgagtaattctgagtcggtaacgccttcaaaaccccttatacatgcatattttcttcctacaccttccattaacaaatttatgcatgatttatatttacgtatgtgtgcttttgaaaatttcaaactcatcttttcaaggtgaatggattatgttgccatggttgcactcgcaaagtggagaaaaagctttagaaaatttatggtacaacacgatttttggtttttatgaatgaatttttgtcttcataaacttcttggtgtggtaaatgaaatcaaataccattagtaaatgttatttgagtcattaattacactaataattaatatcctaaatctgataatttcactagttttttcgcattttaatttcctacttaggagtggcctgttttaacttcaacatcgataggaaacaagttgaagttaaaaggcatgacagatgttttaataattataattataatggctattaaaaatgcgtttaatcataaagcgtctcttgccgtgtaacttatttcatctagttctactaatgctaatgaagatgatgatgatgattcttaataaccctgagtagatgttggtgatcctagcgttgaagaaaccttgttttatttttttaagtctagtttttttcttctgaatttttaagtgtgattgttcaagacttcaagttgaattgtcaaatcttaccagagtcaaatcctttaataatgactttgcttggatagattaattaggccaactagcaaccttgatatactatttttccccctatttttattttttttgccttactttcacttctttgtggaaggatgcgcatgtaaaaattgtatgggtaacgcatttttattttaggaatagcgtttacgtgtatactagcatcattcgttcattttcttgtaatcaaatttgcattcacaggttgatattcatatattttgaatatctctaatacaataaaactatggtgcaaagaatatgcatgtgttaagaattcactaggtaagtaaagacaaaagaaataataatgtgcatcatgtgcattctctttggcattatacaattacatataacaagttgataagtaagaatttgtacttattatatgttatgtgaaaattttaaaatataaataagtaaaataaaattataataaaaagatagagaaaaaagaaatacgcatttacagtgtaaaaagtacatcacacattaaactcaaaaatatatctatctacaaacaatgaaatcttttagatacattttggtaccaataaatctaggtataaacaatgaaatctttaacaaaaagtgtccaacatgcaaggacagcaaggttgtatatttaaggtagcaccagcaagtataagaatagtaatgcccagattccaaaatagtgatgctaattatgacatcaggatttagtaagaattctgtgcttacaaaaacaaataaaatcatgatgaagttaaagtatatcattaatttacacaaacaaataaaaatcatcataatgaagttaaaatttcacaaacatgatatatgtttaaaaactgataagaagacttgtcaccttcataaacttaaccaaagatcttatgagtgtgcagcaaattctgctgaagatcataaattattccgtttactatagcttgaaatcaacgaggagtaaaaccaattcaaataaaaaccacagcccgtctttgttgttttggtttttaattttgagcatttatcatatgagactaacacaatgttaacaaggaacagtaatcctgattctaggacaattttttcaattctagcagggcaaactcatcttgtgctctgaatgcacactacacaaaccacaaaaccttttatatgatgggttcacttggataatgtatataaaagaaaaaaaaacaaagttgtggtgtgatccagaagatatgatgggttcacttggataatctatgcaaatcttttattatgcagattattgacttgaagaaccacaaaaaaaaaatacttaacaaagaatagcaactatatgttgtcccctatacacatagttgtgaagcttaacctactagctagaggtatgatatgctaagtgatcaagactttgttgcatttccttgtagaagaccatccctaatttgtgaagcaacatcatgtacagaacccggtccatgtggaatgaaaacagcattggattttgaggatgcaccaatgtccttcattgtgtcaaaatattgagtcatgagaaccatgtccaagatatcctttgatgttgtcccgggaacattctcggagaaagcaataacactgtccctcaagccatcaactatggcttggcgctgacgagcgactccaagacctgctaggtactttgattctgcatccccttctgctcgctttatctgtaatatcttctctgcttcggctttctcattcgaagccaccctcaatcttgcagctatttgttgtgatgatggtaaaacaacaatgtaaagggtgatcatgaaaacataaaattgcaaataattaacttttttcttcaaacaagataaatctttttttaatttaaggtctctgtaagtatgcaagattgtcttttttaatttaagggggcaccaacaagtataagaaagtaattgtgttcaggataatgatgctaaagatatcaggaattggggaagtcttttgtctaatttatgagatctaactccgttataagctaatacagctttatatataatgaaaaagaatcgagaaactctcctatcaaaacctctccattaaactaacatttattttgatagcatgcttgaaaaggaaaaaatgaatgactctataactgaagcaagaacatgaacatgaacattttgaaaacataccagcgttgatctcattcatggctctcttcacacgctcatctggctcaatatccacaataagagtctgaactatctcgtacccataagctgacatggcctagaaagtaaaagaaaacagattaaggatgtcctacaccattcttaatttaaaacataaagcaaaagggtataccttttcaagttcttcctccactgtttttgcgatgtcgttcttctgctcaaatgtagcatctagttccatctttggaacacttgctctgataactgaaatagcaaacgtgaataagtttcaacctgaagatgcacacataaaattaacctaattaatttcttttaagtagatccacaacacaagctctaattaaaatattcaccatcaaagacataggattgtatctgtgctttggtattggtgagtttgtagtaagcatctgatgccttttctgccaatgctcgatattggattgaggcaaccacagtaacaaacacattgtcctgaggggatttgcatttaatggccatgttcattcaaatagttaatccaaccattaatcaggatacatatatgtgcaatcatttgaaggaaaagcaacgaccaaacaaaaatattgtaatttatgtcaacatgcatatcaataattttacatttcatctataatatccttgctcatgccaagtgcggataagtgtgtgtagagaaaataatttcaattttgcctctaaaagaaatgatgctcaagataacaaatgtgaaacactttaatccttctatagtttatttatttgactaaaatgtctttctattcataatttattaatttatgtacattaattgatagtataaagaatttttagatgatttcaaagattacttttaagatacttattgtaaaatgagcaagatcaattttaaggaggaggaatcggtgtttttgattcatttttctatcagaattagaatttcatccacacaataaagaccaacaaggattacaaaattaaaactttaattgtaattaaggaacaacaccaaaatacttcaaatgtggtaggagaataacaccaaacaagtgagtgcatgtttgaattttcgtccaatttgtttggaaacgcatccaaacagacgaacgaagaagacatcccttcgattcgcaggttggaggccaaccactagatactcaaacattcctgagaaagtgcgtgcaagtggaaaagtggaagaaacaaacctttgtcttggtttcacaacgaacatctagctgttgtatacgcaaagaaagtgcaccagccacacgattgccgaaataccacggcacacagtggcaaccaggatcaagaacatcatcgtacttcccaaatacttccttgatgacaacacttgactgctccacttgcacaaaaccacacatactaaacatttgtcccatcttgatcactaaaactacaacagaaaacagctacacaaacacactaacataaatataatgcaccaattggattctactccaaactcaaaaggataataacaaaaaaaaaaaacatgataatgcactcatgcaccttggtgatgagagaatttgatatatatacaaagaaaaagggtggagagagtgatattatttaactatttatagggagggagagtttggaagaggaaagagagaggtaagttcgtaagtgtatagagcagtttgcaaagttttcgattttcagttttcagaatccaaatcaacaagaattacgcaagttcgcactttgccgtgtccaacagaaaagggaatatattgaattgtttaaaattaggtgggaaatttaataaatgttttttttggccatttaaatgtctgttttatactaaaaaataataattttacattagatgtgtattttaagtttgaaataattttaagtatctttaccgttaaaaaaatttagagttaaccttttttatgatgaattatatttagctggtattttagttggagaaatgtaaagataaaattttgtttttatataattatattaagtaaaatttataagaaaaaaatatttttaatatataaattatattataattaaaatttgtgataagttaatattttataacattaaattattaattatataaatatgagtgtgtttatttcacataccagaatgacaaacattcttgaaaacataatttctaaaatacaaaatattatatcttaaagcaaacattctaaaatacaaaatattatatcttaaagcaaacattcctaaattagtcgtaatatgacaaagacaatgcccgtacaagtcaaactcatccaacttacatcccggactcacgatcacatctaggcttacaccgcatgatggaagtgctacaaaataaggacgatctaattttcccacaatttcaagaattaatctttaaccctattataccttgttataagggtgattatacattataattgacaggggtagtaaggtaattacctagagcagtttaagtttccaggtattaattgaactcctccaaaccccataattaccatctgatgtctataaatatcatggatcaattctcacacaaactatgatccttcttaccttaagagttgttattttcccaaaattctcaatagtttttaggtattaattggagtgtctttctcgagaaacacttccttcactcattacatctctagaaagaagaaccaccaaatcaacatgtaagtatacttttcttgattctatgagatgaattctttattcatcgcttgcagaaggatcttattttttaattgttgaacagtaaaaaagaccattcgtctttaattgttgtgacatttaaacatggttttcttgtgatagtttcctttccttgattcttgcttgttttattgttctatgttccacttcaatatactgctatttactttatacatagcactgccattgaatctttcatagtggctatgtttagccaactgcatctttcttaaatggaaagtcttatcttcaaatttattatgtttactgtaagttctttttcattctttagggaggattttcataaagaatttcaagagaagaattcagatgtaaagtcaaggtttgatgtatgtgtagaatccattctattagaatttcttctattttattttatacttttaattgctcaagaagaaggattgttgcacaactaatcatttacaaactataaatttctttaaagccaatacaaacttaagcatcaatttttaaaatttgcctgttgttttaagagtgagaagtttttatacttctcttcatttgtgaaactagcagctctattattatcatttgcaaagtatataatttttttttgttttattccaccctttgttcattcagattggcaatgcatctggaaagaagtggatatcaatgattaatgaggttagtttctcttgtagcctttcctttttttattattgacttgaattgcgttattatgattgtgatgtctgatggctgaaaactgagtaaattaagcatgtgaggaagaagaacatttttgttatatttgaagcagttgtaattaattgtaactactttttcatttctaggctgatatactaataatggcaacggatatatttactgatacaaaggtgtccatcccttttacttcatattttcttccttttagcatatagatgtaatgcagaagtagcagaactgtgccctctgattagaattctagggtgaactgagatttaatgcagaaatagattaagatactatggttcagactatagtattaaattatattattgggtacatgaaatttagctttgttcttcagttttagaaaaatggtatacccagaattgatcaccaaaaaagatatatatgtaattatcttcagtttcttgcattattaaatggtggcaccatggcggggcagattttatggtagataacatcaatgaaactttggtctttaaccaatctgaatgacatcatgtaatccatgtagctgacctcatctagtgggataaaattttgttgttcttgctagaagaaaaagatagtgtggtgttttatagagccttggactccctcaactacaacaactaccttttgtggtatgtttctcctatagtttttataagcacccatgctcatttgctgatgttcattcaaaatcaatatagaactagtttttgaagtttgtttcctgtttgattacttggcaaaatgtagcatgaagtttgcatatagtttattcgtttatgttaacagcacttgtacctgacaggagtaggttaaatactatgatatagtatcagaaaaacgtatagaatttgatagagcaatggcagaatttaacaataaaatggtaagcgatcactcattttccttgctatggagttgtctcctatttgccaggttatggaatattcaatttattttctgctgcttagcagaaaagtggggagtttgacaaaattgatgagtaaagccaccttatttttctgtagtcattttttctttggattcggtcatccatttctctgggttgtgtattgcaagtgtttgtattgtttcaaatgctgagaagctgagggtggttctttgagaatactctttatttcttttgatggagttttgcatccattgagagattaaaatttaacatttaattgtttaaaagtggaggaaaaaatggtaaaaagatggtaaaagttgtgtgggattctgttcttgatatttatgtgatggcttcagattttagaccaggaactgaatacaatgatggcatttcgaagttctaatggcttcagactttagaccaggaactgaatacaatgatggcatttcgaattaagcttaactaaacatgtttctagttatattaaaaaaatgtttgcattttttagaatttttttggcatttgatggggagaagtttttttcttaagaattatgaatcaaagagatgtatatttttattgattattttaattatttattatattatataatttaataaaaaaaataaaatgatgtttttattatactaaataaataaattcaaaaaagtaaaatcacatctcgcgctcattgaaaaaattttcatgcaagaaatctccctttttaggtatgttattttttaaaaatatatatctaatatgagaaattaaatttcccaagattttcaataaatctaaaacatcccaaatctcctatcaaacatcccaaattaactacggatgattaaaatactattaatatgacatttaagtctctcgcattaaaatttgcttaccatcgatcactactattaatgaacatttactgttacgtattttactacttatatataaatacaaattacataatgcagagggttgagaggacaacgtaggtgacactgatgtagcacgaaaagtaatatttgggagacataacacttatttatttattgattgatttataatttaatttattattgggagtaaatgaagaaagaggcacatttcagcccttattcaatgctttaccaaactcaccatcatcctccggtctttcaatttcatttccaatcttttctgctcgctttatctgcaatatcttctttacttcggctttctcgttggcagccatcctcaatcttgaagctatttgtaataatggtaaaagaacattatagaacaatgcatcagggaaaataaaacacatgcatcaaataaacttatgttgaaattaactatataaatttttagttaaaagtgtctgtataagtatgtaattttgtgtatttaaggtggcacaaagtataagaaagcaattttacaggatactgatgctaatgaaatcaggattttgggaagtatattctaaaatgaaaattgattccctaatcagacttgttagctacatgaaaagtatatatgcttttgaatcaaaacctctcggctaggaaatctccagataccacactaaactaacatagtaacacttgttagcatgcttgaaaaggataaatatgaatataactcttaactgaagcaagcacatgatgaccatctaggaaacataacataccagcattaatctcattcatggctttcttgacaccctcatctggctcaatatccacaataagagtctgaactatctcgtaaccataagctgacacagcccagaaggtaataaaaggaaacagattaaggatgtcttattccattcttagtttaaaatgaaaaggggatatataccttttcaagttcatcctccacagcttttgcatttttgttcgctcaaaagcagcatcaagttccatctttggaacacttgctctgataactgaaatagcaaccgtagcaaataagtttcaacctgaagatgcacacataaaattaacctaatttatttatttttaagtagattcacaacacaagctctaactgaaatattaaccatcaaagacataagggttgtatctgtgctttggtattggtgagtttgtagtaaacatctgctgccttttctgccaatgctcgatattggattgaggcaaccacactaacaaacacattgtcctgatggcatatgcattaaaccatgcttggtcaacacatgaatgattttctattacacttgaaaaataaacaactttgaggaagaaatagtgattgagagttgagaccccttttaaggagaagtgagagtggtagaaaaaacaaaccttagtcttagtttcacacgtaaagaaagtgcaccagccacacgccgcccaaaacaccatgcaacaaagtggcaacctggttcaagaacatcatcgtacttcccgaaaacctccttaatggctacacttgaatgcttcacttgaaagcaaccgtacacttgtcccatcttcactacagctacacacaaacaccaacataaaattagtgcatcaattggatttattctcctcaatactcacaagaatgataacaaaaaaaaaacgtgagttcctattttcccattatatttttattttcaaaagagaaaataaaggctttttgcgtttgattttcaaacacaaaccacaaagacagtgaactcaacttgcaatttgaaatttttgaaagagagagagttagaaaagttggtgaaatttatggggtcggattttttttaaaaattgaatacggtgtaaaaaatttatattattgacacactttaatttgatcaatatattaacttagttaaatccctttcgttatggggagggactactagggagttttaaaaaggaaattagtaaagccataaaaacccgtgagtcaacttggtccaccactggtttggccaaaaaaatatacaaaagttgtaattggttgaaaatttagattcggtccactcgggtcaaatactgatgagccggattgatccacctaaaaataacataatattttgtaatattattttgagccttcaaagttttaaactttttagtattttgtcatattatttaaagacttaaaaattgagagttatagccttcaattttgtttatttattatcttgtttaagactgttttattttagactaaatcataaaatatttgtcatttttctaaatttttgttattatagttctagtttgtgataatatgttttgttataggtttggtttatcaataatggaagatttaatttaattaatattttataatttatttaaatttattttttaagaaaaaaatgattttctattgaattttcttttttaaaaaataaataaattttaggtgagttggtgggtgggtcagtccatttaattcatcaacccgccatgggtcagagctaactaatattttcaaaattcaatcttaaatgagcatggttggattgattcatttataagatggattgaagtagactttacctattttgacagctacaaaaaatagagatagagagtgaaggaatgtggtaaggtaattaacggcagcagtgagtgataaaagcagatttgaaaggttttcaattttcagaatccaaagctgtgggttgggtgaaaaatgaaaatggagtcttcatttcatcaaaccatgtcatatcttcagactccgtgtacaaaacatgtcataaaagttaatgatattggagagaatatttattattttgcctaaagaagaaaatggaattgaacattgtttttttatatggtatgagatgagaggaaggacccaaaccattgaacggaaatttcgtagctatatataattaatgaaatgatcaatcaatgcaaattgcaatgcgtcctagcatgcatataattaattccgtatatgaaattaagtacaatggctagaactagaattaatggttataataattgaaccacttattttggaaacattttttctttgtcccacatatcactctccacagtaattgcccccatgtgataccatctactgtaagtactttgaaatttgaacagtaacgtgaatttcttccaccgtgtttggatcagcgtaaaccatccacgattttactcttaattctaattcagctcgaattgatgatctgtgttgccgatagaaacaaagagaagtcttcatcttctccctgtgtcgagtgtgagtagcaacttatgagcgaatgaaggaacgaccacaatgaaactcctcatgatgggaccaaaatagaatgaaagccttctataactaattactgaatcaaagtatatagagttttatcaaaccgtaaaagaaaatacaaggatattaaaagatgcaatactatataaaaaaaaaaacacaaaatagaataaaagcctatatatctaataactaattgatgttacgaatgaaggtagtaaagaggggaagtggcagtgctttagtgaatatatcaaccaattgatgttggcttttgacatgaatcaacttgatataattgggaactaaccaactcacagatgaaatgataatgctttgatctttcatgatgagctagctatgttcgatgctagatgaatcgctaactcagtggtagatccacattataatgtattaatgctacattccctcatttttttaaaattacatataaatatgttgagtgtagaaattttgtccgtcaccccctgcccccctaattttgtgtatttgacacccactctaattttttacccctttcataatattaattattaaattttatttttttaataaattgtccttcctagcttaggattctagatccgtcactgtgttgactaattgtcacaaaaagtcattgaaaactactgaatgggaacttcaaaatggagaatgagcattttgagctacaccagttcacttgcaaattgcagatttggacacagtaggcttcttggacttccaaagagatcagcgcattgcctagaaagtttccaagcaactaacctagtcatcatcgacataggcacacaaattaagaggattcgaaacaagaaacaatagtccttgagcaggagctactttgagtttgagatacatgatatcaactatcaagtgatggatcgcatgtaagtcaggaatgcgaggttgctgcatatattgactcaacttgtaacactaagaaaattatatctggtctagaaatggttggctcaacttgtgatgcatacattgtccttaatccaggacaatgtcttcccaatttctcgtagggcaaactcgtcatctgatttgaaagcactatccactaggaaaaatgagcctatcggtaattctcattctcatagaagacaaagcaaaggataaatctacataacattaacgcaaacacaaactataaatcacaaataaagcaattttgcccactatcattactatattcacaaactaaaaaggattgaactagatagaaacccagaggacaaagatggcaacgacatatatataaaaaacaaaaaacgtttggatgtggttgagaagatatatgcatatggttgggaagctcaactactagtagagtagtagtatgtgatgtcaatccttcaagactgtgttgcatttccttggagaagaccattcctaatttgtgaagcaacgtcttgtacagcaccaggtccatgtggaatgaaaacagcattggatttggaggatgcaccaatgtccttcattgtgtcaaaatattgggtcatgagaaccatgtccatgatatcctttgatgttgtcccgggaacattctcagagaaagccagcacactgtccctcaggccatctactatggcttggcgctgacgagcaatcccaaggcctgctaggtactttgattctgcatccccttctgctcgctttatctgcaatatcttctctgcttcagctttctcatttgcagccaccctcaatcttgcagctatttgtaatggtaaaagaacaatgtaaagggtgagtgatcaggaataatagataaaagcatgcatcaaataattttttgttcaaacaatgtaaatttttagcctagtgtatgtaagtatatgcaaggttgggtatttaagaattaaggtggtactgacaagtataagaaagtaattgttcaggatagtgatgctaatgacttaatgacatcaggaatttaggaagtatattctataacgaaaagtgattcactgttcagagttgttagctgcatgaagagtctgggctttggtctaatatgtttatgtatgcatatagtccaactaactcatttctaaggtaatacagctttagtcatataataatgacttgaaaagaaactctacaatcaaaacctctcacctaggatatccccggacaccaaactaaactaacatttaaatttttttcaatgcttgaaatggaaatatgaataactctataactgaagcaaaaacatgaacatctagaaaacataccagcattaatctcattcatggctctcttcacatgctcatctggctcaatatccacaataagcgtctgaactatctcatacccataagctgacatagcctagaaagtaaaagcaaacagattaagcatgtcttactccactctgaatttaaaatgacagggataccttttcaagttcttcctccactgcttttgcaatttcattcttctgctcaaaagtagcatctagttccatctttggaacacttgctctgataactgaaataacaacagagtaaataagttttaacgtgaagatgcacacataaacctaattactttgaagcagattcgcaaatcacaacacaggatctaaaatagccaccatcaaagacataggactgaatctgtgatctggtattgctgagtttgtagtaagcatccactgccttttctgccaatgctcgatattggatagaagcaaccacagtcacaaagacattgtcctgatggaatgcattacaacaagttcagtcaaaaattccagccaataatcaggatgcgtatacatgcaatcatttgtaggaaaaatgatgaccaaacaatatgccaacacatcaatgatcaatgatatccttcttcattccaagtgtagataatggactggccaccaaccttgttctgaaagtaaactttaatactagaccacttgcttagggatacactaatcgcatgatacgaacattatatatagaaacaaatgtgaaacactttaatccttctatttataagatggaaagactaaaatgtatcctatattcctgtttgtatatacttgaatttatatgcaatggcaatgtggttttatcagtgtcaagtgtcaaccaattagaaatcgttctaaacaatattttaaaggttaatcataaaaggaggaatccatatgcttgtggcgttatcatcctataataattagagtttcacatctatatttcacgtaataaagatcaacatagaataccaaggtgaaaattcaattgtgatcagagaacagcaccaaaatactgataggagaacaacaccaaaataactgagaaattgcatgtgagtggaagaaacaaaccttagtcttggtttcacagcgaacatctagctgtttgacacgcaaagaaagagcaccagccacacgactgccgaaacaccatggaacacagtggcaaccaggttcgagaacatcatcgtacttcccgaaaacctccttgatggccaaacttgactgatccacttgcacgcaacctaacacttgtcccattttcagtattaaaccccctcaacagatcaaaacacctaaacaacacaccaacataactataatacatcaattgatcatgctcaatgctcaaaagaataataataataataataaaaacatgattttttttgttgcaagaaagaaaataaagaagagttatttggcgtttgattttgaaagaaagcgcactcaccttgataatgagaacttgaatttgataatagcaaagagagtgtcaatgaaaattgaaaagaaaagatgatgataattatacttatagggagggagttagaaattaagaggaaaagagaaggaaagtgggagcgaaggaataaggtaaagtaatggcagtgataaagcagcttcgcaaggttttcagttttcagaatccaaatgcaccaaaatagtaaaatacaacgcaccttgtcatcgtcgttaccgcgtcgttctaccgcgaaaggaggcaaagcgtggattgataatgatactatactactccctctgatttttactataatattaattattttttatttatattctttatattgatatgacctaaaaaaattaaaaatcaatttaatgattataagaataattttgtaaaattgttattctattttatctatttattagttttctgcaaaataatttaggataacaattaagatgggactgtgggagtaatgtagtaatattttttagttttaatgatattattgaatcatttaaaattaagatatcatataacctagttttgataaatgttttcctaaattagcttcaggacaaatctgattttgacttaaaataaattatagtagttttttgttaaataaaaaagtatatacttcatttttttgttgacttgtattttttaaaataaaaatattcaaatataaattccttcacttgagatttctttcatcttttatctatctttatatatatttatcattttccgtgaataaaaatgtttttaaaatttattcttgattgaggaaaaagattcaaccctatttttagtgagtaaacgaaccaactcaataaatttaacccattttatcatctctgattaaagggaacaattaattagtcagtgagcgaaattaacctccttcatacctcattattatcctatgtgtataaatactgcagggagcaattaagtaagtgacgatagcaaaatgaacccttaaatttccatacctcattacaatcctatatctataaataacatagatcaatcttcacggaaaatgctttctttagggttattctgctataattctcactagggatggagtgtttctttactaaaacacttccttcattcattgcatctctaaaaagaagaaccacgatccatctaaatttgtaactcctcacgaaccaacgcacacatcaattatatcacaatatatttattattcatttaatgatcttcatatttttgtattatttaacaaattagcgttcttcttaagagaagtaatcataatcattcataagtatgatctttaaattctagaaggtaaaatgaaaatttactctttttgtaatatgttttcacggtttcacctagcctggccaattcaatagatatacacccgaatcatggaaggttgtaatcaatcgtcaaggcttagtattaatagtttaatacttatattgcggacatgttccatgagtttaggaagaaactctgataaattgaaatcatgcatacgcgtgggtatgtaattatattatatttaatgagatatcataaaagttgaagattcataatagtggataaaattaagaaagttgccatggttgattaggaagaccatatacatatagaaggcattagttgccaacttgccatggatgattcataatagtagcatatataaagatttagttgcaaagctaaactacaagtgcctggaggaggaaatcatggtatgatgatatatgtgtatgtcttcaagactctgttgttgcatttccttggagaagaccattccttacttgtgaagcaacatcactcacagcaccaggtccatgtggaatgaaaacagcattggatttggaggatgcaccaatctccttcattgtgtcaaaatattgagtcatgagaaccatgtccatgatatcctttgatgatgttccaggcacattaccagaaaatgctagaacactgtctcttagcccatcaactatggcttggcgctgacgagaaactccaaggcctgctaggtactttgattctgcatccccttctgctcgctttatctgcattattttctctgcttcagctttgtcgtttgtagccaccctcaatcttgcagctataatttgtaatggtaaaagaacaatgtaaagagtgatcaggaagaaaaaaaaatgcatcaaataattttttgttcaaactagataatgctttagcttgtaagtatatgcaaggttgtgtattaatttaaggtggcaccaacttaattgtgtacatgcaaggttatgtatataagaaagtaattgttcaggataatgatgctaatgacatcaggaatttgtaaaagtattctatgatgaaaaatgaatcacaatttagaatgttagcttcatgaaagtctaggcttttgtctaatatgcttaaatatgtaaaaggtccaacttgtttctaagatgtattattgctttggttatataatgacaaggaattgagaaaactctccaatcaaaaccttaatttcagcaacgaaatctccagacaccacactaaattctagcatttattttgttagcatgcttaaaaaggaaatacgaataactcaaattgaagcaagaacataaaactgtaggaaacataccagcattaatctcattcatggctttcttcacatgctcatccggcacaatatccacaataagagtctgaactatctcgtacccatatgctgacatagcctagaaagtaaaaccaaacagattacatagttctccattcttaatttaaaaataaaatgaaaggaaataccttcccaagttcttcgtccactgcttttgcaattgtgttcttctgctcaaaaacagcatcaagttccatctttggaacagtagctctgataactaaaataacaataggagtaaattagtttcaacctgaagataagatgcacacataaaattaacctaatttccttcttctaagtagattcacaacacaagctctaattgaaatattaaccatcaaagacataggattgtatctgtgctttggtattggtgagtttgtagtaagcatctgatgccttttctgccaatgctcgatattggattgaggcaaccacattaacaaacacattgtcctgatgaaaaatgcatcaaaccatgttcactcaaataatagtcaagccaatattatatatgaacaaaaatattacacttgaaacattgttactttgttaattagtgtgtcaacacatgaatgatatgttatattacacttgaaattaaaataaaagggttttgaggaagaaacaaacaaacctttgtcttagtttcacaacgaagacttagctgcatgacacgcgtagaaaggacaccagccacaccgcagccaagacaccatggcacaaaatggcaaccaggttgaagaacatcatcgtacttcccgaaacattccttgacggctacagttgactgcttcacttgaacacaaccaagcacttgtcccatctttacaccaaacagctacacaaataacaccaacataaatttaaatgcatcaattggatgatcacaaacaatatataataacaaaataaagaagagaaaatgctaatagcaacacatgatttaatttcagaagagaaaataaagaagactcttcggcgtttgattttcaaaaacaaaaaacaaagatatatagtatagtcatagtccactctcaccttgaaaatgagaatttgaaagcaagtgagtgaaatgagaagaaaactaaggtgagtgagaatttatatagagagggagtactttagaattaggaaagagtgagccaaggaatgataaatcagtttcacaaataatgatggtaggtgagtcatgctatattaattgtgatgggtttgttttaatttgcaaaattgcaatgcttccttaatatgcatattacttactaattaagttgaattgaactactctcttattttggaagtgcttttgtctttgtcccatccatcagtctatcactctcttcaccataactattgtccatgtgataccatattattcctctcgctacctttgaaattttaacagtaacttttttctaattaatatatattgaatgttctttaatttgtacatcgcatatgcaagataaaagtatatcttaaattagcttgataagattttacctaacatactagtataaatatttttctcttttcacattttaattattattgatatttaaaatcgcattaccaacactttaagaccaaggagccacaagtcagtgacgaattcgtccctttcaagtatttttttcaatactaatagggtgtttgaataatacaaaataattaattctactcaataaaaatatgataaaattgtgaaaaagtataaacaactatttattcttttatgtccatcataaataaataattgattatttcttaccacaaaactaattaatccaaatgctataaattaaatatctcggctcctgctagtacatatcaaaacttagtttgccaataaccaagcagtactatcaatatttttaaatttttcgtcagcatggttatttatttattttggtaatcgtttccaaaagtgaattaggttctgattctagtgcagtgactaattatacaagagaaaaagaattatacagtaaaaaattattcaaatttattaacttttaaaataataatataaaattattttacatcagtacaaaaatattaaacggcattaaactgattaaataatggagtgaaaactttatggatcgactttcctaaacaggaaacgtctggtttccttttgcagcatcaactgataacacggaaacgctttttttagaagattgggaaagctaattcaacaatgttagaaataagaaaaagtaattaagatagaatagtactaatttaagcgcgtaaactgaacattggactcaaataatgaacccaagtttcgtcgaattataccaaaaataaaaaataaaaaataaaaaataaaaaaatcgtcgacttgaaggattcatggaaacaatgcgtataacttgtactagtgaataataaaaaattagagcaaagttattcatatttattaagttcttcatgatttgcagattgatatctagatatatggaggaaaatattgaaccaagatttaatgggtcggtgaatcaaattctatttgaattttcactttatttattattaatatatatgcaagtcataaatttcatttgtcaattttaattcatagtaagaaaaaatcctcaaaacaacatcttgaaattataaaagtaaaaaaaatttgagtaatttatttgacgatttataatttcaagaataatttgcatattatagtaattttaaggaataaattaatactaaattacaattcattattcctagacgacaagaatctaaatcatgagttagatccaatacctctcaataatattaagttatcagtttttatttataagacttaaatatctaatttattaatatttaaaaaaatggttaagttaattaagaataatcaatttattttaaatttataagaaaaataaaattatcattgatgttaatatttatctttcttctaattatttattaatacattatttttcatctttaaattaaaaatatttttagtctaacaaagtgtaaaggtaaatttaatccgacccaaggtataatcattattcgtacatgtactttaaaaattctggagctgagttggatgctaacatcactcaaacactttttttatatatataaaagggaggctcacaacatttacaaactttacaatgggagttgggctcctataatctttcctatctgttcctacaaattttaaaaagcatggaaaagacttttttatcccttacttcaaatctcatcacttctcccttgtccctttctttgttttcttatgcaacgaaatcaacatctttgtgttggagacacacgaaatcatgatttcattgtaataagggacatacaaaatctacaatagaaatatgttggagacacactagaaacatgtttttgttgttgattttgtaagcgaaaatgtgtttctattttacattttgtacaaacttcttatacaataataaaacattgttgtaatatagaggatgcatgcaaaatgtaaaacataaacatgtttttgcaaataagatcaacaacaaaaatgtgtttatgtgatattttgttcgcatccttgtagctcaataaaaatatgtttatgttataaattttatatacagttatacaaaaaaacgtgttttcggactaaagatattttttgaaaaaaagaaagcttaaaccatttggagacacacgaaatcatgatttcattgtaataagggggcatacaaaatctacaatagaaatatgttggagacacactagaaacatgtttttgttgttgattttgtaagcaaaaatgtgtttctattttacattttgtacaaatttcttatacaataataaaacattgttgtaatacaaagcaaaatatacaacagaaacatgtttttgcaaataaaatcaacaacaaaaatgtgtttatgtgatattttgttcgcatccttgtagctcaataaaaatatgtttctgttataaattttatatgcagttataaaaaaaaaatgtgttttcggactaaagatattttttgaaaaaaagaaagcttaaaccacttggttggagccatgaataatgttgttgggccaataacaacacccactttataacttggatagatccaacattttaccaagatagcccatttcacgaattagaacaaagtacccttcccattgataatcttttggaaaagcttttcgttcagacaatttaggtgttagtatagagcaataccatcaaatttccaaatgttcatacagattcaccactggttttgtttttattttttcttattttctaaaattccccatagtttgctaattatactttgaattataggaaaatatatatttttatgttattcatgattgaaaatgtattaattggtaaataatattaaaattactatatatttaaaaatattataatttaactaattatttaccaaaaactaatataacttattttgaaaatattaaataaattatttaattctctaaacatttaattattacaaaaatattaaataaatgattacttgcagataatataatttttaagatttcttatattaaataagtttttaattttaaagactaaagtaatatcacataaattaaattattttcaagtgaatctatagaaaaactaaatttatttgtcagtcttagaaaaaactaaatgatttaaatatgtttgagatatttctaaatataatattttttatttaaatttgtaattttctttttagttttttattcattcaatgatcattattatgacgttatatatttcggttcctatcatgaatcgttattagtaataacatgttttacatttttgcaaacataataactttttattttcttataaaatatagggattttttttttaatttcagtaaatataacattttatttttacatgtagctttgggttgtccagagcgggctgcactggtatcttgagaaatcatacagtagtttcttaggctgtttcacagccaacttgggtcttaaaaattaagtttttgctgaattaatgggtgtcatcctagctattgaaaaaattatgacaagggttggagaaaattttcactggaaagtgactccattttgatagtgcaggccttttctaatgataatttcgttccttggtctgttagaaacaaatggttaaactatatagagttaacaaaaaatatgccttttgtagtaggtcaaatcaatagagaggataatatttgtgcagacgtacaaaatagcccgtttggcttcttctctcaaatctcaattatttttgttggtggaattctgctcctattttcattgctgcagaattgaataggaatagaatagttttgtctaattctcttgatttccctccaataggtttggttcatgtcctcatggtcttttgtattttcttcatcttttaaaatgaatttcttggttagtgtttgggatgtcagcctagttggaattgcaaactctaaaggtaagtaggatgaagttagctaaccttggttaatcagttcatatcattacatttttgtaaaataccattgttttttatttttaatccccagtgttacaacaaaaactaaaataggtgacatcaaacattataaagataaaaaaatattatagatagtaaaaaacaaaaattattaacaagaacataaaccatatttaaataatctgacttatttaattctccaaaaacatatttaaattgataataggttaatgaatacattaattgattttgagaataaattaagaatataaaaggaagttacaatcctgatcctaatctgtatatgataaattctagggtgagggacttgagcaaaaattcttgtcatggaaaacaaatgtggtgtgttagatatgtacctggattccctacaattataaagcaattgcagggtcttgcagtgatcatctaataagggtatacaaaattttgagttacattttacttaattatttaaataatataatttattttggaaagctaggatatcatgcatgaatatatttctgttagatatggactttttaataacaacaataaaataaatgtgggactattgtaaaatacttgcactgaaataattttaaaaaaaaatactcttgttttttcccttttgtctttctcctctttttcatttttggggagggagcattgactagaattggagaaagacaaacgagggagtcaagactattttttaatatatattttttaatttatttcattacatattgatggtaatctcgcatttatcttaacccttaatcttaaagagtctaaatctaacagaccatatttgtttctcacaacaagggatatcctcaagtccccaacctaagctagtgtttggtttagaagcatgaaacaaccctgaaagggatttcagctaaaaaaaaggttttggaaatgcatgggtgtagaaaaaaaaatgaggaacccacgaacttttactttcatctcaaaaaaggaagaaaaaaagagtgaaaaacaggcatttacacataacatagtaaggcaccggcttggtctaaaaagaatgaaagaggtgtgaaagtgaaaaagataaaaaaaaaatgtaaaatgtttgaattaaagtaaaggatagaggtataaaagaatccatatcaatttttgaaattttcatttcaaattctcccaaagaagaattaaaccaaatactacctaaatactttgattggttgccaaaattgtccctctcacaagcccttcgtaattcttgttggcacacataatcaataataccaacaagttaattaattgattatgttgctccaattttataccggtcactcttgggttcgcaggataatcagttatgcatcaaacataatcgattatatggtcactggtcagttatgcaaacttttgccataatcgattatcatacagctttaattgagtttaaaatcttttcaaaattagtctcaagtgtcctctaatcttgtgatataaccaattatgacaatgacaaatattaagtgttctaagcacattgattaataaacttaaaacagaaatacttttagtgggagataaaaaaattttattcatgatattttttacattgtcttataatttacacaataaatattttttttttctaattccttaatcaatactctaatgatattgagtagcaaaactctattacgattacataattaattgtatccattaaattcaattaaaaaaacaaggcatcttggctccgattgttctatgtttggggtaaatgttattttggttaaccattttttttacttacctaattatttttggtgacaaggtgggaaaaactcctctctgggagaatttcaataagtggagagaaattcttttgagcaaccattaatattatatagagacaaggacaaatgacaagctgttttataaagatgatgtgacgtgcacgcatcagccatcaagactcagacgtaaccaatgtcgtacaagactcttcaatgtggctacagcaaatcacatctttttcgggaaagtgttcgttcgtatataataatacctccattaatagaaataattgataattggtaacagaaagaagtgtctagtctatctagaattcaataatttactattttaggcaaataaaaacaaattaaacttgagaagaaaaaaaggcctgcaaagggacattgtaccttaaattaaaagattgaagtttcatgtagtttctttttcatcatccattgaactgaaccttaaattaattatagaaccatgtttgcaactaccaattcctccactttgtcacctttattctctttcagtagaacaacagcaacctctctgccttccaaacccacattctggaatttggttccaatgaaacaatcttcttctccggggcacttggccttagccttagacaatccacgtagaacacttcacgtgtcttgtggctccacatcaccacatgcttcccagagatcatcaattcaggttccattttatttgtttgattttatttatagcatcctagaatttcttgtgacatgttctaattctttttgaacccaaaattctgctatgtttgttgtgcttaatgttataatatgatgtactcccccagaggacttgatttattgttggataaaagatcattttggtcctgaatgtgcaagacctaattatcgcacttttttacagattgagtgactaaatcagaatttcgttctttcaaggctaaattgttatcaatttacacgttaagggaccaaaatgatcattgtgcttgattgtttcttctgttaattttgaagagaaaaatgaatttgacacttgattgtatcgccaatggatatccatgatgcttatagtgatagtaaggccttgtttgtttactgttttcaaaaacattttctgttttccaaaagttgtgtccactttgaaagtgtttgtccctgagcatatttctgttttctaaaaggttgtctcctaaacacttgaatcataaaagaaaatagaagagggtgagaaaacatatcctagctgtttacggttttaggtttttaaatcacttgttttggaagcaattttcaaaacaaaaaagatttaggacgagaaattgattgctgcatggtgtgaaattggtttacaaagcagtttttgaaataaaaaagtgagaagggaatcaaacatgtcctaactattgagattttggtctggattctctgtttctcatgagaatacggtttctcttcatgcaggggggtgaagcttttttcaggggtgtgttggaaagtatgcaatctgtttacttgaacagaaatcgtactgctaaggccatattggaccttgttcactctgctgagaataactcattatgctatgatcatcttgcattcaggacatttggggtacttctcttggctttagttccttacactttacacttttctgtgtgactcagttatacctgattagcccattcatgtgtatcgtactatcattgcacttaattaggtgaatggttatggaattgattccatggctagtttttttctggattatggctatacacaaagggaagagttgaggtttccagccaaaaagttgagggctttgtggttttctcctcctgctgattcactggctagcaatggcagtggcattaatgggcctttgccaagaatatttatatcagagctactggtagatcaaatgagtccacaaactcaggtgtgttcgtaagaaaaatgttcaattaatgtcactttacatctatggtctgagaattaaatttagtatgatggaggctggtttcctccttctattttgcaacctgtttaaaatgttagcaactgtaccaagaaaagtttcaaatattagcaaagtaataatatgataaagataatcttttatcatgatgttcttgtggttgtttttatgtaagggtgcggtgaaaataggtaagactgatggtccgaggcctatggcctaacccctatcaggcgtagtcaagttaggcctatttactaaataagttgggagaaggacttttaaaagcctgtttaatttatgttaggctagaagtttggtcctgatacttgacactatttcttggtttagttcttacatgaaaaaactttacactttggtccctactttaataagtatttacaaattagttcccaccatttgtcagcgtcataatagtgttgtgctgggctatttacaactgctatgtgactttcaccactatttttatgtggcaaattgagcagctattttgtttttcagctcttcatatactcaatggtatgatgctaaaaggagtactgcataattttctgaaatttactaaattgtaccagggtttgagtttaacatatgttaattcttgttatcttctctctcactattttggacttaaaatccatcacaatcccagttgttgaaattgtgtttataggttccgttttacttggtatggggatagatcatagataatttcttgaatggttcctatgcaactaccggaaccgttgtaaacttgtaaggcagtgttttgtcttattatcttgtgttgttagtagttgtattcagtatgatgacaaaaatttgataagcaaaaaattgtttgatttcttaggattttccatatggtacttctctatatattaagattgagatgcagtatatgatatcttatctgtagactatagtgatatacataattgcatgacaccaaaggtttatacttacatttctgctgcattgtggctccaactccccaaaagccaattgtagtaaaagaagttttgaatttttctgcaggaaataattaaaaaatacaccgaatcatctgtggatggaaacaagtatgcagcacttgcaagttcccttggacatttaacatgggaaaagcccttatattctgagtttcaacaattggcaaggtattactatatgtatggcgggcaatatttttataggaaagtctctactcccttctagcttctggcttacttatggtttgttggtatttgatgaacagtgaaagtgagtatgctgcctggaccctagtcaacgggtatgcactaaaccatgttactatatccactcatcggctgaaaactcatttgaaggagataaaaaaactaaatcagtttattaaggatagtggattcagattgaattctgaaggaggagtgctgaaaggtttgtacccttgtttcttattatgcaactataaggttttcaaggtttttttcttaccaaaataaaagcattcaatgttcaatgtaagacaatctcaggttggtttctttctgattaagacaattgctatctcaagtgaaaaaaaatgaggattgaagagaaaaatcccctcatattcattataatggcaaatatgacaattttccttcaattcctgcttgtgttcaccttctgaaagttttccttgctcatcagatctatcttctttccctcactcctatgttggaaataaaagtcccgtaaagctgtttaatctgtttgcatgctcctaattatgagatgtatactgaaattataacctagattaactatgaacgtgctgatataatcatcttgaaattgaagatgaccatagcaagttgtaattcattgtgatcaaggatcatgtgaatgatttgaatatttcctctacttccagtgagccctgatggtcttctccagcaaagctcaactgtagcagattcaatttctttcaaattttctgatggtataactgaatcagttccatgctcatacattgaatttgctgagcgactggtgctgccgcagtataaaaatttacctgacacagaggtaagcatcattcttttcaacatcagctttcaactttttattataattcttatctttggctgttgatgattaggactaattttatgaccagtgtttttggttactggtgaaacagtgaactactttaagaatttgaatgacctgctaatataatatgtattgtaagacatttttctgcaggatttgctaatccttgtttcgtttttaactaatggagcaggttaaagagttccatagaagagatggttttgaggtagcaagtgctgacaagatatttgaaagcacatccaaggagcagttgagcagagtaggctcataagaggctcatctcactccataccaagaatgtgtatactttatttcccttggggaaatatattacaatttatacccagttgtattctggaagtttggatttcatacaattccaatcatgtggatgttgcatcaataatttgggttgattaatttcaaaaaaaataattaactcaaacacaaacataaaataatcgtaagggatttgtctagcagcacaatatagagtctcagattttacatgcaagttcgagattctcccttgtcttcttgcagtgagataaatataagtgcatttgtaagtgttttttagtcggaagactttttttgtctagtacaaatatgtcatttctttcccctaaatttttctatacaaaaataaaaacacaaacataaaataacatgtctttttccttaatttctgcttttcttactactagggctaaataatttgagttttttttaataaaaaaaaaaaaagaagggaggaagataaaatggaattagaagatatcacaatggtgggcaaaaggtaaaggatctgtgtaatttgcataggaaatctggtctggccagagatgaggaagtttctatgtaaatgaatggtccaaggagagaaagaattcacatgaatgagtccaacttttaattttaatgagcatggtatcagaaaggcccaaaaaacaaacaactaaacaagagactacacaagactacaagagaaagctacattactagtatcagccaaaatggccaaaaacaagaagtgtttctctttttggcataaaatttcacgtacaaaccattagtctggtctctttttatttgatttcctattttgcattatcatggtctcactttaggcagtgtactactgccaaatggtctcttgaaagaagtatggttacagtagttgttcatacgaagaatgatttgttaaaacttttcatgaatatgattgaaataataaaatataccgatactcttagacaaaaactaacaattaaatttgccgataaaaaaaatcaccgatacttggtgcttaaatctttcatatttctaatccctttgatttgtattcaatttatcaagagccaatatctcaatttcgtcgaacatgtattgggtcttaatagcattgccgttttcctgtgtggaccttataactttgatatttgaagaaatgcagtaaatttctcgtccttgttttatacgaatgaaattatgattttttttttattcataaagattaaaattacgcatactattcaaccaactaatctatatttctcggtaattagaagttttgtttaattctttttataagaatcaatttaaaatatctcttgcattcaatggtggacttatatatgtttaaagatattcaaatgcactccttatttgataatattacaaataaacaacatattggacttttacattttgtctccctctttttatataaatttaaacttaatatttttttcagttttttttagtattttcaattttaaagtatctaatttattttattagaatgtaatataattttatgattttaacatttgtctttaaacctatcattccgcttgtattaattttttttttaccaaaaatatctttaatcgaactatttctgagttcaataaattgtagatcttaaaaaaaaagctctttgacagtctaacttcgtctcatgaaaaatattttaaagtcttactttgcttctttacacttaaaagaaaataaagaaaaattaaaacaataaatatatttattactgatgggagatattagaatgattataattaataaaaatatttttttaaaaaaatagagtatgtctcgtgttagaattttaaataatatataaattaaaaataaatttaaatgtttaaatttattaaataaattaatttctttaataattgtgaattaattaaatgaatcttgtaacaagacgaaagagattactagatttagtcaaaactcaaacctcgagtgttgttgactgtatcaacctaattggaaatctaacacgtgccaaaaaatttaatcgtaacatggaattatatactgtacatcatttacacgtgtactgttgctattgcacgtaaaccactttcaacaatgagaatgctcattaccatgtcatcgagttattcaccagacattcgattattaaaaggacgtaaaaggaaaatgttagaacaccaattaaagaatggaccatggattgtatatatcgcacatcattaatgtaataacattacattattaaaacacttccagcatacctcttaaaaactttttatctattagtaattctttaactaatacttttagaacattcctacgtgaccccacataaaagtatattatcctacactagaaccccacgcactataatctttagaaacaataatgataagaatgaacaacaacatcgagatcaaactataaacattgaaatttgagttttttgcaactagaaggtgctataaagtatataagctggtgcctataagttatataaaataaggaaccgggtcatatgagaacaaataactggttataaattaatgcaataaagcttctttctcgtcttttcataaacaaaagctagtgattaatttaaggggagatgcagtgtttgatatcacaagaaaagcctaaataaatcaggagataacatttccggggactaatgtgaaaaacaaaataaaataaggatgaggatttgatggtgttcaatatttccaagcaacctgaagaaaatattgaatgacaatttgagataagacatagtagctcaataagcttcacttgctctcaccctcacattctttcaagataaagggggtcaacacccataagttaacataacatcataaagcagcatatgctatgctttaagagaaggtacatctataagaagaaactaagaaatggtgtaaagggtgaaagagaaaaagaaaaagaaaattttcatcagctctatgctttgccattgggttttggtgatggttggggaaactgatggtgatatggagatgcataagtaccatttggtattgaaaggctcctttgctgctgtccattgcgggtgagcaacgctccttgcattcgcccatttcttgtgtttgggctcgctccaatgcggtcagcttgcattgcctggaaataatatgaagagcttgccatgtccttgaggtttggcaaaggctttaaagcttccacaacttcactcattaggggtctggcttttggatctctactaaggcagtgagcagccagtagggcagctttctgagctccttttaccgaaaaatggccttccaagcgagggtctatcaacctgtagaaccttcttctctctcctagatgtggccgagcccattccacaaggttatgctcaccgttgggtcggtgtttgtccatggatcttctgccggtcaacatctcaagtagtaccactccgaaactgtacacatcactttttgatgtaagatgacctgccaaacacacgagtaaatcttgattagaatggaagcaaatagatactacagatgttggattgcgtctaaaaagaatttagaacaaacataactgaaaattatcaacaaaatatgataaaactcccaattttgtaagtcataaacattatgagaacacaacaaccgaataccaaaccatcaatacaattgatcagacagggaaattatagacggaaagtaatttatgatcataatcataaatctggcttgagtggaaaacaaataacatcagagatcaagagctttatatgtaccaaacattaaaaacagtcccacaaggaattatgttccaatttttttgaaagtagtgatcatcaataacaaccaacgaattcaaagatgaaaaatgcctaacaaaataaagacagatagaaacagcaacaaagcataagcatgtgtgactttccaaataaataacaactaaaacatgcagatttgaactggctatatcaaactaaacttacccgtcatgacatattctggtgctgcataaccataggttcccatcactcgagtagacacatgggttttatcaccttctggaccatctttggcaagaccaaaatctgagagcttggcattgtactcctgaatcggtacaatattagactgataaaaagggggaaatgcaatcttattgtagtttttgacacttactgcatccagtaatatgtttgaagttttaaaatccctatatattactggtcgttcagcttcttcatgaagaaaagcaagacccttagcagctcctagtgcaattttcattctaatggaccatggaagaggaatggatcctacattaatttccacatgagaacataaataaaaagggacaaaatacaaacataaaatatacagcaatagttttgagttccagttctacccaagatagagaaagctgctaaattcatcattagacaactgagatactcaaagaaacaggttattaatggaaattataagagtagtatagtgctgtatcatatcatctcgcttccctcacatgttgagaaaatacttttccatgccaaactgccaaaaaaaattaatctggcttccgtgaaggaaccatgcttcacaagagaaaggatcttcatttgatgttactaaaaaatttcaaggtgcagcagtggtccaactattgttcttgaaaaagaaaatgtgaaactaattagatataataaaatagttacttactcctaaataagtggttttccaggctaccccgaggcatgaactcatacactagcaacctttgatcctcttcaatgcagtaacctacaagtttaacaaggtttggatgaactaggtcaccaagaaaattcacttcagcctgccacatgatacaaacacgaaagatcattaaaaatatagatttcagtagttgacaatagaagaaaagaaggacttttgaaaatatacaaaccagccattctttatgaccctggagcccatcatggtttagggtttttacagcaaccgtaagtcctgtgccaggtttcactggagcagttccattttcttcaatccaccccttgaaaacacaaccaaacccaccttcaccaagaaaactttcaggtcggaaatttcttgttgctaacttgagttcattgaaagagaactttcgcagcctggaagcaattttaagctcttcttcaagcttggaagtggatgatgaattgctttcagcattactagtggttgtagaagagactgctggggctgttggttggtctctactagtatcattagttgatttactttcagctaatggaaagccaccaagagagggaaaataaaaagtattaggataagcagtaaaaatagcatcatgcattataggttttagaatagataaggaaataagcaccaccacaagtaatttacatttttagcatatgtttgaaattaagttatgtccaaatagtagctgagtttagcttcctttctaatatttacccacaagcacatctgataataattaggttaactaaagtctcaagttttgtgtatttccttattttcctaggcaatctaaaatctaaattttcagtggtttctcactctataaacctggaagaccacagggaggtaaaggaaacattctcgtgatgaagcttacatatgcattggcatatattttgggattaaccaagtaactcactgcagttctgaataaacaggaataaagagaactcaaaattatatttcaacatagttttgctgcagcgatgcaaacaccacctgcagaactcgtaatcagacaccctagttcttttggcatatcagttgggtatacatttcacattacttagcacagtaactttcaaccaaactgcaaacaaacctgcactaggtgctccagggaggaattctcaaaatactattcggattttcttaaaagctaagacaaaacaaactactaaaaacaaaaaaaggaacaacatttatacacaaaacaaaatcatatcacaaacacattaccaaggatggaacatccaagcaagcaagcacatcatcacaagaacaacagcaagtcttgcaaggaaatagtgatgaatttaccataatgagtactggtgccactgccactgactgaggtatcaaccttggatcttgaagaaatgcagctcccaatgaacctcaacctaacccaacacccagcctcagcctcacccccttcatcccccttcttcttcttcctcccctttgatttacacacatcccaagactccaccaccttgccattctcagcacccaaccccatctattatctctaccaatcaatgatcaatcaatccctagaaacccagataccatcaaataccaaagaccacaacccccagatgggaaattcccagatgaaacctaaaaatcacaactttacatgccaacaacccttgaaaccgggtaacccacaaaccccagaaattgaaactgaaaaagggcaaaagtaacagatcacattagtaagtaaataaaaaaaattaaaaaaaaaaaaaaaaacaaaacccttgaagggtagattagatggattgggaattgggaaatggaaagtgagtagagtagggggcagagagaacagaacagcacctgagctgaactgagtaatctccgctacataacagatatggggtcctctctatgcagcaacaacaaaaacacaagcacattacacaacacaactctgataaaacaaaaatactattcggattttctttttaatatttaattaatgtggggtttttcaaaatttaaatatattcatataataatactaataataatattatacgaattacgatactaactctcgtttgttgattgctgctgctattattgttggatgatgaggtgagagtcggatttcggtatattcttaattaaatttaattaattaaaagtgagatttttgttatcgaagaccagaagaaaaaaggggatttgtattttgtggctagctgcccgaagaagacgggaaggagtttgagctgcccgaaaaagtgggacccgccgtgatgctgacgtggctgcccttggtcggcgtagcaaaagccaagccgaacctcgcgtcagcttcactgtttcagcggtaggcatttggcatgtgtgtgtaactgtgtatatatttatttaaaatatgtaataataattaatattttagtgcacaataaatatttatttaattgataattatgtacatttttaagaaaaaacaataaaattttaaatactacgttattcactatgagagctaaatatatctcttggtatttgaaaagaatatgtattcaaagatggtaatgtatctaaaaagttaaacaaacttcaaagtacaaacatataccagtatattattaagttgtaaatatacaatgtttaaggattataaattggatgaattgagctaaatttaggtattagtagtatttaatcttttactagtaatataaattaagaaagttttggtgcattttttccattcaaaacaagggtattttagacaatttctttttaagtatttaatttttttatttaataaatcatatttaataatgaaacatttaatagaaatgagttttaaatgtttgtttattataagtgtattttaaatgcgcatttattattactagtaggttttaggataaggacaatagattttaatggtgccattaataaatatttaaactattaattggttattatgcatttagttattatatttatgaatttgaatattaaacataaaaatatcatattaaagagttattattattattctatcttcaactttagtgtaatataccgagtaaaaaaaatacgtgattacataaaaatattaataatagtaaaattaacaaaaaaaataatactataatacattttctgacacattaattttttttaacattaatcaattattcttttattatatatcttttgagtatatacggtaaaaatttaatggtcacgcattcataatataaaacaattttatgttattcttaaataaaaaattctcattaatataacttttaaataattattgtaaaagttaataaaagtattctgtattaaagttaaataatagtataaaaatattttatattttcaatatatagtttattttcttatattataaataaacgtttttttatgaaagtaaatcaatataattcatattcttatgctgtatatcattaattgctatgtgtctcgcataataattattaaaaaaatctctacataaaatgttctttgtgattaaggattttttttatcctaaataagttgtttatttgtttaatatcctataataatagtttttatataaattaattttatactttcatttaatacttttatttaatgttttcattcaagtaacatcaattatattctactctttaaaaaaattgcaattatgtataattaacgaggttcctcaaatgttttgtctgtctttgtttgaatgaaaggaatgtaaattgttgcaagttagtgtcgtaaaactaaagaaaaaacataaaaagtttgtaattgcaatatagtagtatattttaatttcatgggaccgttgtactcaatataattataatgtattattcttttatcattcttattatatagaagatggtaacttcataaaagattgaaataagtgaaaatcaaactaaagattttcaattattttgtagaagatgataacttcattgaaaatcttgaaaggcttgatcatgtttttaaagattgaaataaatgaaaagctaacaagaaataatgtgtataatttgaagtttaatcgcaataaaattctaattgaaaaagtgaatttaattggttataagttgttcaaatgaagtgaatctggagaggagtgataaacatgtataaaacaattgataaatatatttttcaatatgaattcacatgagtttaaactttaaacaacaattttatttcctatatgttataaaataatattttttatataattaattaaaattgtctcgggctaatattttaaaagaaaataaaagtattatgtatttcataaaaaaataaattaaggaattaaaatattttaactaaaaaataaaatatatattttactcaattaaagatagttaattaaatctaaataatttaatatttataggaatataaaaattataaaaattattttttaacttccaccaatgatatttaattataaaaaaattaaaaatatctaccaaaatataaattataatttaattaaataattattacaatacaatctatatacaatataataatattcgtgcatgcacaggtataaagactagttaagagaaagatacagtaagaagtacttattctcaagagtgaaaactaaatttaatacataaaaactaataattaatttaaagaattataatattatattttaatatgtaaaaaggaaaaaccaatacatataattagtgaaggtggtatggtatctaaaatctcataatgctcataaggttctaagttttggcattgatctagaataaggtcttcaaatgattcagattaatcacattgtttatagtaacgtcgcagtacctcctaactaaggttaaacttctttcataaactctaaacgttggatctagacagtggaaaaatatatcatatttgttcttcatcatcaatttacacctcttacaactaaataagatatatatttaaaaaaatatctcaacttatttaataaataaacttaaacaaggtctagcttaatatggaataaattataaattagtgacatacctatcatatttccctggctaataaaccacatttaaagcattttttttcactgtgaatccgggttattgtttagttaaaagatagagataatttttttaagatgttaagattttttttacggaattaagatgttaagatttatttaaagattaaatgatactcttaattcattatattttaatattttttattttattacattaaattttaaaaatttattttaattctttatattttaaattttttattttactacattatattttaaaaaaattattttactcctatattttttaaagtttcatgatttttttttcatgtttcgttcaaaacattaatattttgtccatgttttaatttttgacagaacattaaatataaataaaataatcaatttaaaaaattcacatttagtttcttatagtcgccactaaaaataaatgctttaaatgtgtttatgttttatttagtatattaaattctggattaaacttaaaataattaatggatcaaattaaatttattaatcaaatattttacactttcccgtaattatctgattagaatttgagaaaactacgtaaacatgagaataggactttactctaaaatttaagtgtataaaatatttaaataaagaaaagaataaattatcaagaaattattggaaaacgtcaatcttttatataaatctttaacatcttgaaatgctttgggctaccaatacatggataaccaaaaaaactaaagaataacccgaatccactaaaataaataaatgctttagatgtgtttatgtttatgcttgaaataattagatactagggatattcctttggacaaaaaatatttgtttttcaaaatggtgtttatgttttatttagtttcttatagaataattttaaataagattgtatttgatagaaaatttaaatttctttaatctaaaattcatcgtttgtatgtttgtatgttttgtatgagaaatttaaatttttgaaattttaaaacagaattttaaacaactaaaaatgtgtaattttaattttcttataagatatgagaaattaaaattctatttttgacataacctttcaaaacattcacatattttttttataatattcatcctctttttcacctaaaatttatctaaattcattttttgaactttcaactcttctctcacgcacataattctcctcttcttgtctttattttcttttatcctcacaattttaatttttttatccaaatacaaaattttgaaaataaaataatttcaattaaagtatttaaaatttttaaattcccttatcaaaacacactgtaaaagaattttttttggaatttcaatggatttttgtaaatttttttggcattaaacaatatcgttggttaagagtgttatgcacgtaacttggatgcaatagcacaatataaccagcggtttttttcctcatgcaatagcacaatataactagcgtttttttttttttctcattattggcctgaaaatcaggtaaaaagtgcatagatagcgttagcaaacatatgcatttgaaaattgaaacttgccatcatttttcagcagttttatttctcttaaaaaacgttatttgcaaaatttaccctcaatttttttactagttgtttccccttttaacttcataaaaacttattctaacaaaaattaattcaaattataatgaattataacagtaatcaagtatacatataacaatattctgattgtatatatcaattatacataatctatggagtatttaattaattaatttaattttgtcccaaacacattatgcaaaaaggagataagcatgttacatttttctccaatactccattcttctatatattctcccatggtattaaatattaatttaggaaaacgaaataagtagcttccaacttttgatacctaaaacttgtcattcaagtgtaggctgtagtaacagtaaggcacactgtacacagatataaaggggagaacaggaagtaggagtaaaagggaatttacgagagtcctaataatagatttattttaagagattgcttgctagataagggatcaagcttgactttaaggatcatcgtggagcatggaggtttaccttcagtgcttttgatttgatattttgatttgaaatgaataactaaccattaattcaattattgttctatgctttatcatctcttcacgttacattatatggtcagctaaaagtatattttgtttgtgttagccataaaaggtcttgatcaaagtgcaattaattcacatctcaatccaacaatgaatatttattatagagagccagtccctataaaaaaaaattaattaaagagagccaattggctagtagagaaccgagaggaagattttctagtgtgtagttaaattaagattttttttaaatgattaatatagcatatgtgataggaagaagctgtagcatgacagtaggcccaagaggagcattaacaatccttcatatctcgatgattttatgtagcctctctaggatcaattagcaatagtgttgtttaaggataatgccaaattctcttagaagctgttagtaatattagcgaagtatgaagtctattattagtggagaatcaattctattaggatcaccgaaatttgttattgtctatataaacatgagtatataaatgaataagtggagatgaatttgagtaagaatacttagtgtaataagaaggtcccttgtccttgaaatcaatgtctctttcctctatttctccctttgctcataataattggtctgacatgccgttaccctgtctttcatggctgccacgccagaccacaccacccaccagtccacctctttccatcatagtctttccacatagccatccactagcacccaccttctccttatgtgcacccagcttaatcccttgggattgattttgcgagtagaaccaattgctagccttgtgcgataccaaggaaactcttcaaccttcatttcccaccttcatgaagaccactaaaaccataaaatgtccttgcctgcctctagaaagtatagacgcctctcttccacaaccattgtatctgtcgtcgccacctccaccaccatatctaccgtttcattcacaagttaacactgctacacgtaaacacaacctaacaaatgaaacaatcaggacaacatcaagagccattaagcctccatgtcaacacacttcttcacaggagcgcagaaaagccaatttcccatgcgaccaccacagcacgtgccttcatcttccaccaaatcgccctctgcaactgccccagcactcaccgtctttgatatcgccccctccaacatcctccgtctccaagcaccaaacgtcactgtttactcctacctttgctggtgcagcagagccatcaacaagatcagcaatgagaatggtgatgcacaaaccaccgcctcctccaccaccatggccggcgcggtcttgctcctcccttccaagttttcccttccttcactacagccattctccttttgaaaaacttcattccaatattcaacatcatccatcatctcccgattccatcaagccattctgtcttctccatgcaaatgaagaacttcaatatgatggtttcgggatcaatgttcgccatggagaggatatcgagacaaatgtgcttcttcacagtgaacttggcaccatagatcgactcgccgcgagtttcttttccggcggtgaagtggccaccctaacacatgaaacttgagatcatgtcgtggaaggacaagcccttgtaatgaaggggcttgctgctcctccttacgcccttctcgccggtgcaaaacgccccgaagttcttggcggtgtgaggagtcacattggtgtagagccccatcacgatgcgaccaacaggtttcccatcgatggtcatgtagaagaagaccttagggttaggcataattgctgcagagaatagagtaaaaaaaataacactattgagaaagaaaaagagggattgggttttactttcccacacgacaccatttttgtcctttgctttccaacattgtcagggcccaaacaagcccaccaacaaagcaacttccatcatgtttttttctaaacccacccctattctagttttgttttcgttgcccaacctggaggaaaaggtttgttttccaacgacggataatgatagcaatacaacccaaaaagagagtaggctcaaaagggtgcagataccagcttacctttgtgactatgcttgattcacagacaacatattccagtcgctccaaccacttaggatatttccacaattttgttattaggatattttcattctattattatcttgtctcctctgttgaggccattagtgccaatatcctatgtagccacaattataaataccatgatatacgaaataataacaagcaaagaaaattatcactcaatttttatcttttatttagaatagcttagataccaggaggttaccttgtcctcgaatacaaggtaaaaaccctctgttcataacaattggtccgacctgccgccctccaatgacggaagtcgtaccttcctcagccaacccggaccccctcgaggccgccattgtcgaactcgctgtagctcaactccgctttgccatgacccaagcctccatggcctccaaactcgatgtcattatcctaaaactgaataccatggtacccaaccaacactttctatcttcttccactgcaaagtcaccacccacagtcgaaaccatgtcgattccccttcccatggcaacttcccacctcctgttaatggcaagccccacgcatcctcctttgaccctctttgggccgccattcaccagtttcgctcagagcctcccagctgcagcatccttccctccggcctccacttatccctttccgtcgtgttcatcaccaaggtcagggacacaaagctcgaccacccattcctcctcaccttctacacaattctcgtcgctgccaaatggctctgcctccgcaacaatcttcatttattcattcctacacccactttaatttgggatccgagttctcttttcttacacccaacaccttgaggacaaggtgtttttgatggactagggaatgatagaaaaaagtgttaatactcgtcgacaagtgtaccgatttgcacaagtagtatataaaacggtaagaccgagtatcgtatccacaaggaatttgtttcacttaggttatgtatattcaatatgtaaacactttttaacttggaaataaaataaagattaaatgatggataagttttttgcaatgtgtttaactacgtaaacaatggaaaaataaattcaaagctgtaaaaatgcgataaatatcaaggtaaaagcatcggggagttacctactgaaacttctcttgccgtataaaaaggtttttctctatttaacgttattctagtgctcttgcaccgagaaaatactcagaccatgattcctagcacaaatgagcctaactctcttagcttttgttcttgatttcttaacaaactcgttctaaaagagttgcaataagcatatagtgcaaaacatactagattactgcattctattcctagatacacaagtctctagctttctttatcaagttctatggttttaaagcattttccaacactaaaaagcctaactaaacatacaaatgggagatcaaaccaccagaaaataacattaaatagatagttagaagattacatcaagagtttttagtagactactccccaacaagaaagttctagccttccattacaagaaaagcttcatacaaacaagaaaaagaatatttttggtgaaagaaaatggaaaaaggtgaaggagaatgtcttatccaacctctctgcctttcttctctttgtttttcacatagcaaaatggctggctagactgtggttgtggtgataacctttggttttttgccaactcagtgctttaagggctcttggacttctcagcacacaaaggctcacttagcaagtatgtctcgctaaacgagagtaagtgaaaatctgttaagcgagcttgtgcgcgctaagtgtgagaagagacaacatcctcgctgggcgggctggctgcgcactgagcgtgctgatctctgacttatcctcttctagggttttgcatctgctaagcaagctagctgcctcgctaagcgaatgagtaagtgaaaacctgataagcaagcttgtgcgtgctaagtgcgagaaaagacaacatcctcgttgggcgggttgactgtgcgctgatctctgacttatcctcttctaggattttgcatccgctaagcgagctggctgcctcgctaagcggatgaggctcgcttagtcaatctgtctcgctaagcgagttcatcattaactttttgcaccttctcttctttgccctacaaactgagttgaatttcaacattagatcacaaaaaatggaattctactctataaattcacacaagaatgaaaatatttataacttccactaaaagaaccataaattggagatacattgctattttcttacaatttttcaaaacactaataactcatgaataacaattaacaagaagttgcagcagaagctcatgacagtaggcccacgaggagcactaataaaccttcatatcttgataattttgtgtagcctctgtaggatccaataacagtagtgctatttctggataataccaaattctattagaagctattagtaatattagtggagtatgaagtttgttattagtggagaatcaattttgtgtggatcacagaagtttgttattacctatataaacatgagtaaataaatgaatcaacaaagatgaatttgagtaagaatatttagtgtaataaggaagttcgttgtcctcgaaatcaaggtctcttccctttgcttataacaatatgttagttagagcatgcattaatgcaagttttaaaccaagtctcaggtattcaaataatttaatgttgtaaaaatattattaatgagaagtttgtgaggtacgtgagctgcataagacaacattaatacagtttcacatttcatacatggttttgtcatgcatgatgaaagtcataaaccttattcatgttaattaaaccgcaagatagcaactattttagtaagatttgaaaatgtttaaatggtgaaatttaaatttgactatgaaaaaggtgggaaaatatgtacattgtttttggtttgtggatgccgatctatctacttgacgaacattttctcttgttaccttttgttattattttctttaggtagctgtatatcatttcatgttgttcagatctattgcttcagtatgccgattctctcaattaataataataacctaataagataattaaatattgggtaaataatttaatttgtccttaaaagtgtgatacgataacaaattagttcttgaaagataaaaattataaatttagtctttaaatgtataaaaaaatgtgacaaattagtattgttgttaaatttgtgaggctattttattattaaattataatattcaaaaattaatttgacaataaattatattttttaaaaatcaatttaacattatgatgtaaagtttaatgatcaatttatcattaaattgtttacaagattaatttatcatatattttttacacatttaagaattaaatttaaaattttcatttttcataaactaattttatcagtgtcatacactctcaaacacaaatttgactcattatccataaaaatttcattaatttttcacttgtaaagtggtgagaactgagaagttcagtggagtcaatgaggaaaaatattattggcataattaatcctctataaaataataatacatgcaaaaacagtttatgtggcggcactagttttaagatatagaatctcgactgggtcaaattgaactctagaattatggagtgtttttagggaaaccatatatgtagcaaattccttgcttgcttctctctctctctcttaaggttttatacaatgttgagctgtccccgatggctttggaactcttgcttgaagagagcatgggaatctttgtctcgatttgtttaagggcctttgcacaatctatatatatattagaaacacatataaaacatgtgagttctattttatatttggtgttttttaataataaaatagaacaagatttaagattaaacgaaatcagaatcaaagagaatagaacacaacataatgttctattttaatttgatatgttcacgtgccaaagtaccatttggtggacaaataacatatgggttcttatgtttttttgttatgcttggagcattgtgaaaataaaatgaaacaagaaattaaaaagaaaaaaacagcactttaatggaaccaaagagaacaaagtagactttttaatttttatctgttctaagcatatgtcaaagtagcatttgacaaaacttaaataccgtattttaggtactatttgtaatattctcaaattagaattatagtttatcttgataatttttataataaaatctgcattattttttttttgcggattaccaagataaaacctcaatttttatgggaaaacaaaaaaacagctaaagtactgtatatgagttttttccataattaaatcaacaatttggtctataatatgcaataaaaaatttacttaaaatattattcatcgatatgagatttcaatggtacctcaattatcaggtttcgcccgaattttatatagtatctttgaaagtctgatatgggaagatccggggaaggatcagaactctattaaagggactggaacttttttcttttataattattttaatttaaatatatgatttttaataaacaataaattaatacataaataataagtttgcaaaaatatttataccaaatcagtttaattgataagaattgcctataaagcaatcttatataattacactattatattcgaattttctagaattaaacaatcatataaatacgaagcacataatatacataaagataccgaatgaggggggcctgccccccttcaatccgtccatgggaatatcatcatgtagatcaaaattgtaatattaggctgtttgcatataaggctagaagtgcttttggacgtttctctattaaaagaaattttatattttcaataggaaagctctggaaaatacttctggcttatatagcagttaaaacttaaaacaaggatagttggcctgaaataatgaacggtataatcacctacctgcacaagcagcgcactctggtaactacattaaactcaagcacacaagacatgaatgtttttcgcatttctgctcgtaacaactcccaacagtagaaactagaaagtaaccatcatatgatcgaaaccattctaatgggaaatagttttttaatttggttaagtcttaggatttcaaaataatttcaatgcgaggctgacttgtagggttgtcctgcagctcgagtttcttttcgcttgaaaaaaaaaaaaaaaacgaatttttcgaaccccaggaggcctcattcataaattacagactcatcatcatcattgctcgagcctacttcagctccatatagtattaacatgagtagaaatcacagtacggaaaaatgcagcagaatagagagtatgttcagaacgagagctacaaaggaaaagggaatggatcataatgaacattataaaatgtttataataattaataagcattaaatgattgtaagtttacatgataaatttcaatataaaaaaattatcaaataaggagaatttttactcgaaatgaaattttaaagtaacaaactctattcctctatctctttccctccatccaatcttaaaagtgtaaaaatctgaaaactagatgatcagtggaaaatgcactcagttgcagctcaatagtattatatataatgattacattcttccccttaaagaggtacgtaacaagcttctatttaagctcgtggtttacaaagcaaaagtgaaactactaacacaatttgacatgccaactccgacacaattctcaactgactaacagaagataactactgttgagctattgacagtaagtcacgagatcaatttgaagtccaagcaaaatacccattttgtgcaattaagagtaagttgcaagagaaattctaaaatttaagtatgcacatcatccattttttgtttctactgtacccaagaaaaatgaaaccagctatacgtccaattccaatctatatccccttggagatactggaagttgcatgtatctttaatgagcactcagggatataggtaacacctgttacacccgaatgtaaatcagtgagaacttgagctgtatcgttttggcattttgcattgtgattggcagttgactatttgcaaagaagaaaaatctttccaatgacaaataaaacagaatgtacaaaataataaaccaaagttctttgtatacatacttctcacttttgcgttgtacattcgtaaaagcatatgttcttcacatgtaaacaccaaaagggatgatggtggaaactgctgtaaatttgcactaatttacaatagaatctccctgtatatattaagaatatatttgtaatttttaggatagttttgttttcctattttccctctttctcataatatgtctagcctataaatagacattagtgcttgtattgcaaaacacactcgataatattcagttttttctcttttcaaatttcaagtaggtatcagaactctcaatttcaagggctccgctcttgctgccgtccaccactgcctgtcaccactcagctgccaatttgaccagtgtgaccataccggatggggtgtcatctccagattggcttgtccccaaattcacgttgccttccaccaccaccactacacatgcttcttcccaacacgtgaaagccacataccattcctgtgccaaccactcgccagcacatagcaagtagccgctgactcttctttcaggcctaatggttagtctttccttatctcatcccgtttagcttataaatagggattagtgcttgtattgcaaaacactcaataatattcacttctcttctcaagtgaaacaaatgactagatctaggcagcaaaactattaatatgaaatggatcaagacaaaaatgggcacttgttacagaatgtcacactcacagctaagggaagccaacagaagaccttattgttatgtgaatgggcgatacttcaaaataacaatgacaatcatacaagtaacagatcttaaaccagcagttcatcttctcattaatttgtattgaccaaatattctctatatagatgcttaaacatggaattaagaggaaaaaaatggtccaaaagtacagcaatctatacctttttccttgacatcaatttgcaaagtgtccagaacaattatgccatcagtcaatggaagtagctcaagctttatagtggcaatggattgagatggaatacatctgatgtggcccaaacatgtcttcaaatcaatcagtaccagtctaaacacaatttacaggaaaaagagacacagagagatttgatacattacccaagtggaattctactctgcagccatagatgtgtacaactaagatcagaaccaggaatgacatcatcactcgtagaaacagcctgggctttgccatcataactttgtttctcattatcttttacaccaagagtgaaactttgtcgctgggtggcaccaattcctctttcaccatttactcttactaataactctgagaaacctaaaaaaggactcattggagtcgttggtgaattcaaggagactactgaaaggggtgaagtaaatgaggctggagcaagcacagtcaaagttagatcctcagaggtcaaatttgaagcttgaagagttaatatctgataaaaattaaatcaaataataaattaattgtgattgaggatgatgacagtataaaagtactgatagtttctgaaggaaaataatcaaacaaaagtaaatgagcttacatgaaaacaatcaagttgagatagacaatagctaaacaatatattaacctgtatgggaagttggcaagtttttccataagcagcaagagactgtcctgacatctctgacacaaccgagatcataatatcccttgagctacgtggtcgccaactggttggttgcttaaagaacaaccttgatgctagattaaacaaaaaaaaaatgggaaaaaaaactaattatcaccttacatgcgatactagatggcacaacagtaaaccgagtagggcaaaaagcctaccagtataattgcatcgacatgaaaccaaaattgaatactggtcattaattaaagcagtcttccgtctgttgagtcttagttttgatgttttatttctatgtttcatccttgaccattgagaacttctatcatcctgaatcttgtgacccttccatatagaagttgctggtttaagaataaaagaatgctcttcacctctcctgtaattagaaacttttagtaagatgaagattattatagctaatcacaaaaaccaaattctgaatttcacaaacagctaatcagattgatctcaaaaataaaataaaaaataaaaaaatcaggtgttcaataaacacacatcaccttcactatctacatgcagataatatttttgtaaaaaacatgataaaaatattattctccaaggtaatttttggattatttatgcactattgaacactcctggactatcaagaggtccaagtctctctcaattcctttacaaattattcccacacgatgaatgagtctcctctcaacccctcttcttatttacttacatcatcaagcctcttgactcactaagtaacccaataattaactagctaaccaggaccaatcagaatgctattcaatagagccagccaccacaccatgaaggattcacgagaaagcccaaagtagtgtatataagtggggggcaactttcatcttacaagtcggttttttaggatcaaacccacattctgagaaaccataatgcctttttttcttcaatctccaatgtcataagccttgtgacataactaactagtagttgttgaagtttacattgttgcctttttcctcgttacccacactccttgtacaaatgcctcttggattccttgcatacactctcaaacttgtaggttctttgtccttagaaaagttgccttgctcctccacataggccataggctctaggcctcacacttgtttatccacttgttcattttgtgcttatatggtacagtagctaggataccaagtaaagcaatctgaacaattacaactattataatatagagtagcattagaatcattagacagatgagatatccattctaacaaaatgcatgccttattaggatctctagttagtaatttctcaagtgcatattgactattgaacaccccccccccccctttccccattttacaaggtttgtttaaggtattggggagagttgtccatctacacaagtatatttgatagccatgtattaaggtcagtcaatgcataagataagtaatgatagaaagttataaacaatattaacatatttattcaggaaaataacctgagagctagatttggtaaagaatgatcatttccagcttcaatacatgaaatcggcaatgacgacagtgatccattttttgtaaactcctcaagaacaatagttatggtatctataaatatcacaatgtctggagcatgtataggagcaacattctggagaacaacttaagaactattaataaaagcagaaccgaaaaaataagtaacagtagaaatgcccaaaagagaggcatgaaaacataatatacaatatattagaaatataatataaattcattcatgttttcatctaacagcttaagcttttagggcagttgattcattacatggtatcaaaatctctatgatcaagtagtctatagtacaatccttgttacccccattcttttaataaaaaatatcatcacaaggtaggtggcttgtgtattttccatgcttcaagctcaaagggcttttgcgtgagagtgtgctagaaatataatataaaacaattcgtgtatgttcacttaacatattaagaaattaggattgcttgtttacaacacaatagacattgaaaaaaaatgtcaatttgatggatgagtagttcaaacctttatctgaacacacagaagatcatctgaattgacgtcagcagcaaaagaatgaatgtctaatggctgtattattttaagtttccttctccaccttcttcctggtgtatataggccttctaatccacaacaaacatgaaatctctcttgttccagtgaaacacctcggaaagatagaagtccttcaaaccccatctttttccaaaaatatttctgagatgagatttgatcccaatccttaaggtcaaaatttggcttagaactaactgctttgacaggagcagatggagtgctcatggtttgcggtaatgatgacatggagtaacttctaaaattgccaaaggagaataactgagagctagatgatccagaaaaattggatccctgagaggagctaccaattcctgaagttgaagttaaatgaggaggaaatggcgggtaagtagaaggcctcccattatccaacggaagcatccaatttaacagctctgcacatgaatcctgatttgctgcatccaccttgctgtcaggagatgacattctctcctgacgcttttcaaattgaagaatttctatacaaggatctctaagaaaattaacaccaacattcacctgtaaaacaacctgcatccttccacacaggaaagcagagttagatcaataatctgagtaattgagataattagatttcccaatcataaaaaagcccagaagtcaagaagttatatagaaagcatttcttgatcaactaggactttgctagcaaaaattcacaaatgccttcaaaggcattaaagaggcaaggcaaacaccactaagagatatttaataaaaggaaatgttcaatgaaaagaagagactaaggtgaaagcatccagaagacagtttgaagcaacaaatccccagttttaaaggatatgtactagataggccaatgatgatgtaattacataataaatatactccacaatagcaggtccaagcatcatatacgtataaaatttttatgatccatataatccagagaaaatataaagattcagatgtctatactgttaaacactgaatcaaagcagaacatacaataaacccattccataacctcatccaaatgcactaacaagttacattctaactaaaagattctccatgtttcactagccataacaagaacagcaagtgaattgaactgcattcttgcatgccttggttcactaaaatttatttctagtcttaataaagtaagaacaaactatgtatttgtatggattattttatggaagaaagaaattttcattacagagaagagggaaatacaactagagtgaggacaagatatcatccaagaaaaaacctagatacaagaaaaaggtgtaaaaacacaactatgggctgaacaccaaagaggccataaacataattatgtctccaagtttagtggcaacagacaatcttaataaagtaagcatgccaacccaaactacagattttattctctaatctgcacattattcattacaaataattgattacaaaaccgtatcttaattatttccatagtatggatgaaaacaacattgtaaagaaattatacagtatgcagaatagtaatttatccaacaaaaaacaaactaatagatgcagaatagtgaccaaaaaagaaacagggtacacaacaaaaaacaacgatgaaatgttttaagtagggttggcaacatgaatcaaacagcaccatagtttgttatcagaaatcatgtctatagacaaactattaacctctaaatccttcaaaatggtttcacctacaacttttctcagtcttcctctagctatagtgccagggttacctttatctgatttactctccttactagggattcttctataggtcttctccacatgtgcccaaactacctaaagcaagtttctatcaccttttctatcataggtggtactggtaccccacttttctctaatgcattcattcctaatcctatttttctctggtttatccactcatctaatgcaacattctcatttgtactggattgagtttcttcacttgtaatcttgttggctttttactgcccaacattcaattctatacaacttcccaggtcttatagttgtgtacacaattttttgtttaagctgaagaagtatctttttgttgtagatagcacgcaaggcattgcttgaatgctatgatttacatccctacttctccaccattctgtataatggagtgatgggccctagatactaaaattctgtgactagtggtaagatattttctccaactttcacctcaaagctatggttgtagcacctcttgctaaatttgcatttcatatactttatcatacttctaattaacaaaaagtcatgagcttccaaagtttgtctccacatctctaatttccgatttatttcctctctaaactttctaactagaactatatcatccctaactttcaccataacaaaaactttaaaaaaaaaaaaaaaagaaagaaagaaagaaaaagatccaactttcaaaatgcttcaatttaagttcctagtttcaagacagaaaagtggaccatttatatgaattttaccttctaaattaagaaacgagaacaatgtacaaaaataggtggtgcttgactctaacacctggactgactctttcataatataaatttggttcccaacacacaattgaagtaggccaaatgaatgtggtccttaaatacagaaaattaaaatggaacttagcctttctgtttttttgttaaaaatgggttttgaaggagagcaggtggccacattccaagatcaagaccagacacaaaccttgatcagggcatacagagtaaatatggcctacaaataaaggatcaccagcagtaattgactttgccatgattttttagttatgaacaaaatagcttgaattacaaccataggtgatttcttcactgaatgtgaactaactgactcagccaaaatagatagaaaaacatggataatggttgaaattatatctgatgaaatactgctttcacagttattatttatgccattctcaataataccaataacataagattcagtaacatagcaccctacccaccacaggggaaaatcccagctaccattaatacaatttatcttttattttccttattgtgtatcacaatttccatagattttctgagttaaaaatacctataattgtatattataaataaaagaacatagcaagctgcttgcatgcatttgtggaaataatggagaaatctaggcaatcaaaagggaagaagcagagaactatattgcttggtcccaaatttaatgaataaagaatacttcgtctgacagtggaactttaaaatccaaacccttaacaaacaaaaaaaatccttgtctctcctaaccaaatttagatcaattaaatgcacaatcatagttttcaacttttatggcacataccactaagtctccattaggtaaagcacaacacttcacagaatttcttgccactccaccagaaacatttgaatcaaaattccctctatcaataatagtactaataggagaaaatgtgtcccctttagatttgattgttgaggccttttcagtatttgcatcagaagagttggaaaaaatttctgaagagcttcttttggaccaaaggggatcatcagactcagaaatcctcacaaagaagtgagaattttcaaacttttgcaacaataatgcggtttgttttttgagaacctctttttgaagaagggattcatcatcagaaacatcttccatctgctcttcatcactggtaccaggttccccttctccagacactgaattgtttctgttttcaatgtttccattttctttcttggggctgtgacctatgccattgtcacttgtcactgcatcaactttgaatgaagatgtatcctgcttacatgcagaaaagcatgccaagatatgaactcgttcacctgaattacaggtataaattaggtctgctcaactttttgtgaaagccagctgaccaaattacatatgccaaaactgagattaacataattaaagaatgaacaatctatttaccagggaaaagaaaggagcgatcaagagagcacagagactgtatatctggtgcacaagtccagttttcaggaagttcctctacaaaaagaaattgagaattggatgtatcgcataatacatgcagagaaatcaggtccataacatcacatacaagaggaaggacttaaaagaaattgtttttttctaccattgaactgaatgctaacaaaaaccgtgatatgattataattttagtcatgtgcaaagcatataagaaacaaaattaacaaattgctggtagaccttgaagagaagagacaattgatgtaatactactttccctaatggtttagcacacaacagctgctcctgtaccccatgtagatatcaattcaatactccattaatcaagtacttgcacttgcaccacgaagacttatatccaaaaagggtggagacctattacagcgtttctttatgcttaacattaggaaaaatatttcatatcttatactggtataaaaaaaaagtgtaaatatactccattgggggcaagctaattaatcttacattaatctatcatttaattttttattttaaaaaattaacaaattagagaatattcatcagaaataaaaaattaaaaaaattgttctccctttcccttctcctccaaaacccaactcccaactcccgactcccaacataccctaaaattgtaaactaaagctggtatcatgtttatagcacttgtaatcctttgcaatcactaaacagcaatttaaaatccttatatcaataacaagctcacatctaacatgcaagggaacaacccgttcctcccattttttcaccaacaatcatgacgagagtgtctttctccctactcaatacagccaaacaaaaaatgacggaatgaaaagaactaataacatattctctaacacaccctatgctatattactattagttaaaatatactagaaactataaaatcatgactgagactcaatagacaagaagtgagacccacaaaattccgtgattttccaataaatttcagcaaataataaagagtgttttaggaaatgtgttactagcattactctagtggtcatataagcactgagcagacatcaatatgtaagtgaggagggttagcaatacacttattagttaaaacttattgaaaataaaaaaaaaacatgagaaagaatcattatatgtgatgtgggacccacaaaaatatgtcatttccaataaatttcaatcgatcaaatagagtgtgggcaaaaagagtgtgagagaaagtgtcttcttagcatttctcatctgtaagtaattgacatagcaataaattgaaccacgccgcaatcaaattccgttgcaacgcggaagaatcaacaaaaacagaaacaagcaggaaaatgatgataggtgaagcaaagacatactgcatggaatggtaacccatccttcatcctcagcaacatccacgtgcttaaggaacacgccactaacaacccttgcatcataccacgcatacggatcatcagacacacgattctccaaagaagatccagcagatgcagacctatgatgcgtatcaacacgcggctccggaaccggaatcgacggagaaggctctctgtacacgcccgtcgtggaccgcagcaaaaaattcattgcaccaccgaaaagttaattacgatattgtcctgcgaattcaaacggttcaatttcagcgaagaacgaggaaatatgctataacattgccggattgtaaagcgcgaaacggaatttggtggaactgagcgaaacgagaacgagaaagcgctaatggaatcggaacaaacggaaagtgaatatcgaatagagaattgctttgaatgttacctagggaaatggtggagatcgaaagctgcgatcgtgatcagtgagaatgctgtcttgatttcattttcaagattattcactgcaaagttttggcaaattattctcttcttgaaagtttgaaccttttgtttttcgggtggcatctattttattattgagggggcatcaaatagaattcgctgtttgtgatttttttttaaaaaaacaataatcatttttactcgtgaatgtatatggaaataataaattcgtccggaaaaattaaattccgaaagtaaaaaaggttgataaatctatcattttgtcaacaatgaaaaagtctatggatagtcttaataaatcaacttgttacgcacgagataaaaataattatttatttaacatataatttaattttttttcttctcttattttaatttataacattacaataaatactcaaattacaataaatactcaagagaataagaaaacaaacataaattataataaatataataataagcataatatatctattgttccaaaattttctaatgtgatagtatcttatctaaaatataacactcaaataaaaatgcatgaccatgaagttaatccttacaaaaaatgagatttaacttgattttatcactacttaatgttgtcataatagaaatgtcaaagcaacagacaaatcatgtttattgatcaatattaagttgttctaacttatatttatttttctattttttaagtgattattgtaatgttatttttactatgactagaaagacaaatatatgaagattaaattatattttgggtaaataatcatttttgtccctaaatgtgtagaggatttggatgtgtcacatagtctctttaatcaagagtaacaaatgaaagataaggaatgaatgaatttaatgtacttttttcacttttgaatattaaaatttgaatttttatttttcggaaatgaatttgtcaatgtagtacatattgatgaacgaaaatgactatttattctttttttttcctttcttttttaaggaatattgttgttgtcttttaattttgaaaatatacttggacgtgtggaatggtaggataggcctgtaatctttatatttagttcgtttgagattttaaatattataaataaaaaagagatgaaagtattttaaacactttgaaagaaataataatagttttttatttaaaatatatttgatgaatactcattatgatataagatacttagaaaaagaaaaaaaaaagaaaaaaaaattgatttataaaaattgaaccaatattaatgattgatttataacactcacatgcatatttagtcaatttaactaatttttttaataagaaaaaattacataaataaatggaataatcctaaaaactaaaaaaaaatgttaattttaaatttaaaacaacatgattacttaacatagaactgaagtactacaacatttgaaaaatgcacatcataatattgggtgttacaaagtacataatccaagatatcataccaagaaaaaatgaagggaaaactacataccactcacggagaatctttatcgagtgtattcctaaactacaaaatacaggtaagattaatcaaataataaaagtactacatcaacaccttaaaattacaaataaagtccctaaaaacctaaacctacaacttaacatgtgagattttatttagttaaactccatcaacaccttaaaattataaggcactacatttccatgataagcaagttagaaattgagattttcatttgtcccatagtttgttctatcgctaaacacacaactacctcgaagtgttttgttatatttcgtggttatatatattatatagactcttctacgggaattactaaaattagtgcattctagattcgaaaaaaaaaatctaaagggtacaaactcactacatgacacataatgaagctcccttgtgcacttccgaatctcactacaaactagtgatataaaaggcacacgtgacgatgggcaatgggcgatgctgcaaagctcaaaatttccttacaaatgaagcaacaagtggtagtatctttataatataaaaaacattatctgctaacaaattttgtatattttatatagataattttaatttaaataaaatttattatttaaagagaatgttggactttgtttgtatttagatcggtgtaaatctaaatttttaaacaattagaaggagtaaaagaggcaaagaattaaaggtgagaaattagagggtagaagtaaaagataagaagataaaaaaaaatgaaaaataatttgaatgcaaaagatgaatttatgatgtaaatgtgttagggtttagcatgtcaaaactacttgtgatacaatgataataatttttttctatctaatgttaataaatttttttctatttaatgcaatatcaatttccaccctttttcctgtccttagaaaataacaattttctaatgtattacctcctaaacaatacatgacaataaagcacagaaaaagagtaataaaaactggaattacattaaatatacaatggggtttacattacaagagtttggcttgctaaaatttacccgacctcgtgcttagcaaatataacaatgtgatcacgtgttgagcgcgacggtgtctgaacttaataagtatggcggtgatctcgtacttgatgtgaatccactctaagtggatctttagtttgaccgctaaacgaggaaacacgttagacttgtcttgtacgttaaatgagatgtcctaatcttcaacttttattcaagttttttcaccaattttttctctccaaatcatttatattttccttcttttgaatcttactggtaaaaaattacaataatattaaaatcctcattagtccattaaagataacaatagataaattttaatcattcatagtcaaaattcactatcaatcaaactcaaattttgtagttatcaaataataataattaattttattaataataatgaaagtcttgttatattaagcgagaataaatgaaaaaataaagcttctataattaaaatatcagatgtaaattatttgaattaaaatattttattttattgatgtattatataaaatttattttttaaatgtaactatggtttattaagattatataattttaaaaatttatttatgtaaataacaccctcacttttgtacaatgtatcaagaataactactgggatccacctagcaaatgaggaatttaagtacagtaaaaaagtgaggaatttaagttcaaactttattattatcattatatatttaaaaaatataatgtattaagatgtaagaattacaaaattataaaattggtggtaaatttaagtaatcgtatttgaaaataaaaaaattacaaagaaaatatttaaatactaaaaaatatccattaacttaaaataaaatatatttctggttcttaaactttccgtcaaacttgattttggtgtctataattaaaaacttttgttcgctcaaaatttactaattaaaataataaatttaatctaatataaaaaataaataaattttccttcttttcaaaatttaatattatattttattacagtaaaaaaaatattgtattttattaaattcttcaaattttatcaatcttttataacttttaaattttaaaaattgtttcatttctcaaatttattgtaaattttccactttctaaatagaaaataagattttaaatagacaaaaattgacaaaagaactaagtttgtcgataggataatttaatttatattgtgtgtttattatattttttcataactttactttatattaggctaaatatattttatataaaaacacatatattaaatattttggcttaattatacctttttttcacatactttttttctagagcattttgtctccaacaattctattgtgacattgtcttccatgatattctttttaagtttcaaacaacacatattaagtgtatttaatatagtgacgattaaaaattatgactattattaagttttcttttgttttttcttatttgatgattgtcttctgcaagtcacaactcgatccttacgttataagtccataagtccgtctcaaaatggtcattttatgaaattaagcattgctatcatgtctgaagtttatcaaatgatgcttagctaccattttttaagtttatgaattccaaatccttgtgttaatgttgtatgctagtgccttgctcattgccataacttcaaaagtcattaaattgatgtaatttttttatagataaatttaaaataaaaattttaatattttattgaaaactaaaacatcaatttttttagtaattggtaagaattaaacttaaatataattttttttacaataatcgatacaggattgcttaatcatttgaactagatgtttagattactttattgaaaatattcaagtctcgcatcggctatctcactccttggaaaaatctgatcctggacctccactgtctcatcccttaaaatgcagtttatatatttattaggtaattttatttaatattaattaattttaagataaatctaaaacacttaagtaagaaaattcaatacaattcaaagttcaaacgcacagcaatctctaactttaccggacgaaaacaaaaaacgagagagaattcaatgattaggactattcactcgcaacagtccaaacccaagacgccctctgccattttatcagcttatcttaatcaaaacgaaactcacacgttaccgaaacaaacaaaaaacatgtctactaagtgatgacgcggattggataagaatctggtaagagccaacatgcacatttgttagtttcgattgttgtctatcaaaattgaaactcacttgaaaccgtttcacccggggctttgaacccatggttttgaaatgtactaagttacttaataccatatggttattactttcgaattctttcgtattttctactctttcattgtaaaattcaaaatctatcgttgcttataatttatatagcctgaataaaaaaaaatcgtcgctgttaatggataatgactggtgagaaaccgggttttgaactatacaaagcaaattgacaaacgtatggttgtggctttccctgactattttttccccttctttgtgttgtagatgttgcttcactggtccatttacttgacttgaagtcgtgctataactgaaaaatatcttgcactttatcattgttaataattcacgtactcacataaagactatggtggttttgtttgtcttaaaaaatgcgataattttcgtttcagagtatggtacaatgatcagagaaattattagttttcgtaaaattaagaaggaaaaaaatctagcgcggactgaaatatcttttctattaacatctcatttctttaaaaaaaatcctgttttaataattatcaagacagcataatttgttttagtacactaaaaaatcttacataacttaaaaattaagataattagtttataaacctctttctttcttgacatagtaaagtgccttttaatgagaaagtcatgaaaaaggcccttcagagttaaagttaagattgataatgaatttaaccaattctaaattaatttaaattttaatttgataattgattgaatttgattcttgaattaaatgagttgaatttaaagtaaatgttaattttaataaataagatgaacttaaattattagtatagtttaacttgtttgaattatgaataattaatttttaattaattttatgataaatctcatgtttatcatgaatgaatgagtgcaaatggaagagagaaaaacggaagagtggaagagagaaagatgaagaaaggtaaaattgattaacatccgggtaatgctaagatgagcaaaactcactgattacataaatacaatgtgccttatataacgtaattagtcataagagcaactaattgtaactaactaaactaatttgtaattaatcaaactaacttgtaactaactaaactaatacatatctttaataccccgcatgttagaaggtgttgaaaatacttttagattggagaagacagtacatcaacatcaaaggaaatgaaaataaagtctaaaaaattggaatatgtcgaaaatacatcggccaaaatagaaatctagaaacaaatcaaaatgtaggtgtggacatggtgcatatcttctaaaaatcttcgaccatcatcaactttcccaatcttcttccaagagtccaaagtaagcatcaaagcttaaccatcaagcgaaatcaacaataaggctatttgacaaaaactcaaatcatcaatctagaaaactattaaagcttaaccaccaagagcagaaactataccttaaagtttaaccacttgcagaggcaacaaggcttaaccatcaagagaagaagctaagatcaatgcttaaccactcaagacagaagcaaaataacaattcaatacttaaccatccatggcaaaagcttaaacaatgcttaatcaccatggacagaagtttacattaacaaaatagaagaataacaaaatttatctttaatgagaacttttcataaacactttgtgaaccaacaataaccaaggcttaaccacccatggcaaaagctaaaacaatacttaatcaccatggaagaagcaaacaaatgaataattcttaaccaccacacatgacttaagctaaaatcatcaaaataaacttaaaaggctgaaaacaataagccaaaataggccaaatatcaatgaaacaatgaaaagattaatcaccaaacaattggtgtgcacctttttgaaatagtgcaagactttcccataagaaaacttcttttgaatccaatatttataacttcaaacagcatcagtcaacaacaaagcctaagttgaaagattttttgcagcaattattagacggtatcacgtaaaattgttgaacttctttgagaaggctcttcagaatcctagttttgttgaacatctttcacgcaaaatcgagttcatggatttatcagttgtttctgatatgaatttggtatcacgtggcacacagagttcaaatgcagatgggaaaggccacaaaaaaattgtctgaagtagaaccaaaaggagtgctgacaagaacaactctgatatttcttcacatatggatgatgaaaatctgatgacatcgtaatcggcaaggcacaaaagaggttgcaatggtaaaaagtcaatatgttttgagtaaagaaagggtgagcaatattgttgaagaaggatctgcattgggaactggaaatggtgagtagcaagactgtttctctaaacaaaaaaaatgaacgaagcgaaaaaaaagaagcgttgggatcaaactgattttgacattggctagtgcaaagataatgacttgcaaacaaaatgaagcaggcgaaaaatgaagggtggtatgacttgataccatgataaatctcatgtttgtcatgaatgaatgagtgcaaatggaagagagaaaaaaagagaaagataaagcaaggtaaaactcattaatattggggtaatgttcaaatgagcaaaccccactcataacataaatgcaatgtgccttatataacataattagttagtaactaacttataactagttaatctaatttgtaactaaccaaactaactttaactaactaaactaatcttatctttaatatttcatgttaattttatttttatatgaaatgaaataaaaatatgtaacaacaattttgaatcgaattagattaaccagttaaattaaattgttcacggacttcaacttaattaaatccaagttaatttttttttatatcaaacttgaaccatatcaaggcttatggaatccagccaagataaactcatattaactcattttcggccccaggggaaagtataatatagtacggatgcaattagcatgcatgtcaaaatcaaactcatgtgaggtaattaatatttcaaaataatataagtttgatatttattattaatgtgaacatcttgttggcaactaattagtatgaattatttgaactttgagatctatgagttctcaaaatcaaacttatctcattttttgtacagaacttacctaaacttttcgtaaccaagattttttttcgtacatgaagttgaaaaactacgtgtagtgatgtactgtgcatgataagttgataactactactagtattgttaatgggttaccgtaagaggaaaaaaggataaagttaaaaaagcataacaatatttaattgaatttataaggaaaatgtaagaaatttatgtgactccggtttgctgcgtaggggaatggttcctccctcagttgcttccttcctcttgtgtccacccagttccccctttcattttccattcaataattcaaacaccagttaatggctacccttctattccaccacaattcgcctcagatattctcttcctccttcttcttctcacagcattaaacgccgtcgttttcatgactccataattcaccggaagcagaacaacaacaagaagcagcagcagcagcgcgagttcacatgggattgggaacaaccgcgagaagcagaagaagaatcgtcatcgaagaaggttctagaacaagaacacacaacaacaccaacaacgccgatgccgatggagctggagcaggagctaggttcaacaacaatccagcgttccttcgacgcgcgctacacccgccacgcgcgcgactcgctcggcgaattgcctgacagcttcaccatcaccgacccctccatccccggccaccccatcgtcttcgccagcccgggcttcctcaagctcacgggctactccctccgcgaagtcctgggccggcccgcagccatcttccagggcccacgaacatcccgaaaatccgtaatcgaaattcgcgaggccgttagagaggagcgaaacgcgcaggtcgttttactcaactaccgcagagacggtacgccgttttggatgctttttcgtgtttcccctgttttcagcagcgacggtggcgccgtcgtgcactttgttgccgtacaggtaccgcttcagaaaaaagaagggtccggagtgagggatttcgggttcgggtgctgtcggaaggaagtgtgcgtggattcgttggcggagattgatcgcgtttgttcattggagcaagtgctcgaacctgatgtcagaggtttatttctttgttttgttttttttttcttccttttctttactttttcatgcatgtcaagtgagtgcttcgtactcaagcgttgcttcaccaaccctaataattaaattagtcgcataattaaaaataattttaggacaaaacgtagatacatgtgctttttgatcatgttaggttatgctaaataaagaaaaaaagttaaaatgtattttaaacttgatatttgatgcagaattgtaatagttccttttggtctcccagtaattgtcctagtgtttgggttctactgattttttagctttgtgggatgcagaagtggagagagaagagccgtgtgaggcgagtgatgatgagaagcgaagtgctgttactgccatggacagtatattttctgtgctaacccattacagtgaggccacagggagattggtgtgtagaaagaggtccagcattcctgacgtgggtcttttaagcacatccttgattatttctcttggtagaatcaaacaaagctttgtattgtgagttattggaaatgtctagttttgttattactttaccgcaagctttatgcttttttgcagacccttaatttgttgtttgtatgattttgagtttccatgcagaactaatccgcatttaccagacatgcctattgtttatgctagtgacgccttcttgaaattgacaggttctaaagccgttaccttgtataaattagatcaacttcaaatgaacttctacaaatgtaaaatgaattaaattttcatctcaagttaatatcagcctatgcatttccactttcatctcaagttttcatctaataactgagacacataagttgattttaactggtggaagaagtttggttcattgtcttttttttcaagtgtttattgaatatccaaacttagccttataaaaaagcctcacgatcatttacagctaaattctgacatctgatatatggatctaaaacctatagctcagatttacttatgttttcaattatcctgttacttgaataggttatgcaaaaaatgaagttttgggccacaactgtagatttttaggtggaacagataccgatacctcgactttacatctggtgatacacttcttctcgccataggttttttaattttgtcttgtaatttggcaacttagagtcttagactaatgggaatggaccattttgttatgcctttctcttattgcttacgttcagataagggaaagcattaaaacagaacaaccatgcacagtacgtattttgaattacaggttaatacttcacttttgtgtctgctgcctaagccgtgaagtttatttattgaatatgctgaattagttttctgcaacactaacaggaaggacaaaagctcattttggaattttcttcatatctcacccgttcgtgatgcttctggcaaggtaatgttgacagagtatttactagctgaaatataaatcttaaacgcctgtttttctttttgtcagtcgtttgttttcctcagtctgattggacagcagcgaggatttcaacacaatcaaacatgattatggtctttatattggagaaattagatgacagcttctgtttttgctgctttgaccgtaccaatttttttagtattctaatcagtcaggtcgtaatgcataccaatatttaaatttacagaagtttttatgttgtttgttgaagtatcccccctttatgattctaaactctgaaatttctcattccttgtgcatgggaagtgctttgttggtctggaaaaatcattttctaaggctaggttgttaagaaggtaatcattcatatagtaacaaaactgattctatttggttgctttttaccagttcttactaatcccccaccaaaaagaaaaaacattcaagcaatgaagtcagtaaactgatttgcaaaaaattataacgtattcaagattggttcattggaaatttccctacagtaagttttggtgatgtatcatcatctaccgttaactttatagatctataatttctagaattgaattgatgtaatctgatggctgagatgagagtcttatgatgaagagtagtagcagacattgtagttgatgccttaataaatattcgcaattctatcttagttatttggataatttttacagtccattgttgtacctgattacaatttcaaatgcgagcatttggtctctcgtttacccatttgatacctggattattccacacattcttttctttctgtggctaaaaggttgaaaattccaggtctagcctcctcccgtccaatctattttccttagaataggcaatagacttattgatccaggctttttaatttgagttaccaactatcattagttaattgggtgaattttgttttcccatggatacaatcaataaggatcttgcggatttaatttagtcacgggtccattacaagcactttgggaagagatgctttcagcttcatatacgggttttaagtgtatatacactatacatcatgtgatagtccttcacatttacatgccttgaatttgatgatttattacccacttctattttagttgcatacaagctaaactggtgaaatctgtgtgcaaaatgtagaccaacaccaacttattctgccccttttttatggtgaaattttttgtaatagtgaagtcacggaaaatattctgctaattatactgacaattactgaatcctctgtttgttcaggttgcatactttgtgggagttcaaatagaagacaacaataaaaacgatgatagccattgtttgagtcctgagaagagacaacttagtgtggttggtgtagtcaaggttgcagtgaggagtttatcaatgactgcgggatcttctgagtcgtagcaaaaggatcatgtgagtttggaacaaataatatttgcctacttcccagaaatattaatccattcgaaaaaataatcaatctcaattggtgattgttgagatgatagaaaggtaaaagaattaatttgtgaagaagaaaaaaaaagagagtccatactgtcaattgtaagaaaacattctctgttggacgtgtataaataaaatgtattatatttcctaactgcatttattttccgtaatgtagcaataaaagttgacttgtactattttcatcttatcttttatcattatgctttttcccacttgataaaattgacctgcattgacctttttatgtttttttttttaatttagctattgaatggtcaaatttaagagtaactaatacagcacgtattaattttagtagaatattaaagtatctatatttctttaaagaaaagaaggccttcatccattttgagtgtttattgcaattcacagataaagtcttaaagcaaattaatattgatttaacacgaggtttaactcagttaattaaataaataagtgttataaatatcttcatagtgtattataatatcttaatattgaatttaaactatatcttctttttcttcttaatgcatgtctttaatcttacatttctagaaaactactgtaattaataaaaaaaacttagcttgttattaattagttagagcactttagaaggagaggttactaagtaccacactaaattcgtgggctttaactctttaagtagatgaacaggtgacaaattaaaatggtagatatgctactattttttactaacaaaaggaagaaaagaaaaactcggttgataaaataagattcagcaaaaactgatggataacttaaagtcttaaacagaatagagaattccaaaaataacatgaaatgggaaattaaaaagatgtacaacagcatatagggcaaaaagaataggtggtgtgtctgatcgagtcgaaacctcaaaattacccctctaatctatacatccacacgaatgcctcaatatcccattacgatttcccctatgaaactcaaaattaccatttggacaaaaacttacacatttttgtccaaaccataattctgatttcaaacttccaaaccatgcagcctcagtcacttaacctgaacccaaaccgcagcgctgggaactcccgcgtgcactataaaaagcatataataccccggtggtgccaccgcgagcgaggggggcccacgcgccaccaccttgtagccgaacttcgccacctcctgaaccgccacaacgtccaaaaccagcaccctctggttcatcgcgaacgagtgcgtggtaaacgacggcgccacgagcgtgactcccacccctccctcacggtactccttcagttcaaacgtcacagcaaacaatctcccgtacgacgccgtattattctccgcctccaccgtgagaatggagggcttcaagttctcaaattccacccccaaatattccgggtaatacgcgtccatactcagctccgtcgggtacgggttggcccgaaaatcataaacccggtgcgggttgctcccacctaccaaaaccctgccatctggcaccaacactgcagaagaatgatacaatcttccagtactcgctggagccagtaacttaaacggatcggccgaaccgggtttatacataaccggatgcaaaaccgggttcaccgcattctcccatcccgcactaccattcattgcaccgttcaaaataatcaaatcaccagtaggaagcaaaatcatatcaggcataaccctaggcattggcataacttccataacccattcaggattttcatccgtcactttcaacctcccgcacgttctagaagcttctagaaatattcttaacttgttcgccaagctatacgcgccggggtacgcgccgccacatatcataacctctgcttccggcaaacgtgtttgtccgttagttagtcccgtcaggtttaacgggaggagaacggaggaagcggtgctagggtagtttcttttttcttggcctgggattaatggaaagttgcggaggattttgtttttggtgtaatcgaagagaatggaattccggttggcgaagatgaagaggttgccgtcggggaggaggtgcaagaacgggtaaagattgttctcctcgccgcggttggggtcgcgtgtgagtttcaagaacggtaagaaccaaaacgacgacgcgtcgttttggttctttgggacgaattcgtaggtgaaggagttgcggccgccgacgacgatgactttgccgttggggaggatctggtttgaggcgtaccagcggcttgtggagaggttgtggttattgtgttcgagccagtcgcaggtgttgtggctagggcaaggggtgaaggagcggagttttgtgtagccgtcgttgaagccaccggtctggaggagggtgccggaggcggtgagggcgccggaggagcaccaagcgtcggagcggagggtgagggggcggaacgtgtcggtggcgaggtcgtagaggacggagtgggcggtgcagtcgagttttagggcgaggtcgcgggggttgaagcggcagcggtggccggagagggagatgttggaggggccgaagtcggtgcggtcgaagatcaccaccttgttgtcgtacattacttgcatgtgcatggcggagatgcctatgctgcgttgcagctgaacccagtggccaccagtacttgttgatccctcttgaagtgtcatggtgaattggagaagaagaagaagaaggaagaaaggcgaggcgttcttgatcttgaacgccattgtaagaactaagaagtgcttatacgatcctactgtgttttcttttccccaacgagattgtgtgtatatataactatttatatagaaggcaaacttataagggaagggtgcttaattatggaagtgtttatgttcctacgttgcaaaggctattatctttacttttttgttcttgtatttactgctgctatcttcttttatatcgtcgcttttgcgcgttatctcactctttgttactgtccctctcagaagaatttattgtggatattgagtttgttgtgcattaaagaatagagcaagcagcaatgacagtctgctagctcgtgaggataaaagggggggcaaggcttttgagggttttgggaggacacataatcctttggaaaatgatagttgataccatccattagagagacacaagaggatggaaaatatgtagttatggtgataagtagtaatcatgtaatagaaaaagagagataaaaaataatgaatattaattaatagtacaagttaacattgtcaacatgtaatattaggaaaatagagaaaaatgtagttcctatgtgatactttttctttcggattataattattgtctaatgttgttttacataaaaaaaattaataaatagatgaaaaataataaaaattttataaaattaatttttattattattaatttattttttatttttataactcatatcattaatattataaaaaatataagtaaaataaaattaatggtatattaaaaagcttaaatgatgataattattttgattttttttctgacacgatgattagtatgaaatagagttgaatatcatactgaaaaatacattcttgtgtgagttatcattttctactaacatattaaaaagtggattttgaaccttgctaattaggccatgatgcatggtataattaacatgttctttttttcacttgatttcatcaagcaaatgtcttaaaacgtgtgtacgtgaaggaaaacttgaattacctctccaatacgtactctgcggttaacgactagaattttcctatgacggtagtacgtactaaactatccaattctataatttgatgatatataattagtaattaattacaaagtaaggaaggttaggtaggtatgcctctcaagatcaaaactaacttaccattgatttgacaatcttagacttatgaatgaatcagttaattaattgataaaagcacgatgccaaataatttaaggagcatgcggtctacgtacaattaattgtagttaagagttgaaagtgaaattgtgaattattacttgtaattaagagagtgaatgtgtgtggggctatgagatactactagtgtgcagcgtctgcatgctgttggttagtagcagtaataaggtcaacgttacaagtcttgcaaaaaatgagtactctgttgtttctgactgaatggggccttaaactttctgtgttttgcggcaattcacacacttcaattggaaactttgacggtggtggctgtcaactattatgatagtatctgactacattcaccagcatggaccatgtttttgtctatttagaatagaatcgcgcttcactcaccttacacaacagggaatggctcagatctgtcaaatataaatatgaggaaactgtgtactataacatttatgaaccacgatataattaattcaattaaattggatctacctaaaattttactcaggggaggccatatatctccacttgtgccacaaacatatgggaaaatcagcagcagcatcattaatacaagatgtgatgattcaatggctgtatgtacacattttctgtgcatgcaagtagtggcatggaaggtgatgcttctgaaaattaatatttttgaggaaccatggctgtttcttcttccccctaccccattagctaggttcattaaaagaggaaatgaatggcaatttcttatttaactcaattaaatattgttactttaaacttttgaaacacacaactaaaaatagaaaataaatatagctaaactaaatgagaatgagaatggtatacttcggaacacttgagtagggctttaccctatggatttttgcaggttaggcattaggagaaaaatatgtgttaatcatcacctcaacaatttgggccacagaaaatcaattcattttttatttaggtagagtagataactatacattctcgggatagataagcatttatctttcacattgtcagagtatagtacaagccaaactaaattatctttgttacaggggatgatatgcaagcgaaattaggaaaaattgtttgataaaagcttttaagaaaagggttgcatcggtagaataaattgtttgccaaattataaaatctttattccttgattatatggggttgatgattctaacttttcatcccattgataccttgtaccactgaacgatgtagtaatattggtcttaaaagaagcggcggaatcagcatccttagtctgtatggtaactatctttacaatttggccatgcagatcaagtttaatcaggatacaaaaacattcaacttcaaaaagaagcgacagaatgtatagcctcacgcctaaagattttattcgtcaactgtggattttagatagcaaaaacttatttaattggcccacaattatttacaaactaataaaatgtctctcaccaaggcaacgcaggaatgatattataaaaaccttttcttttcaagatatatgataattctattttcgagtcctcaacatcatggtttgattaactctcctaacaagtgctttaatttgaaatacataaaaaaaaaacactaaacaaatagtcaagcacatttagttatattttgttgcctctgttttgttttagttgcagcatggcttttattattttggtactatgagggtgatctcgttaatttggttgtgtcgtcccatttcacatcgtgtgcagattaataaaccgtcccaaacacaagttgaataaaaaccattttgctctcactattgataaaagaaagagttagaatgattacacatggtgctatatcactatttttgtttttgtttctattctattattgtagcacatacatatataacatatcccgatgctatttgaattagggggtaaatgctgtgcacccgttgaacacaactccaacacaagactggcttggccaaaatttggtcattgaactctttaagtcaaattctcaattaaaccatatgaaaaattttccccctttgcttcattaattagtagtacctgttcctctatatttgtacttagtggcccaatacaagtagtgtaggaagttcaacccacttagcacacacatgagccaatagaacttctctaggtgatagtggttaaagttggcaccggatagccatggtttattgtgggtgccatttccagtgacactgtttactatagacacaatcactgaacttaggtagtaccccattgccaaagaagcccaagaaagagaagtagccaatgatctcattcttattggtgcctctgtgaagaaaaattccaacaatcctgccaaggtgaaaagatcagcagatccaaggaacaagtactgaaaagcaatccacaagaatgtgataggaagtggtttggttggatcatcaagtagccctgactgagttgccactcttttccttttgatttcaacaatagcagccactgccatggcaactatggagagtaccaatccaaaaccaatcctttggaggtgtgtgattcccatttctgacttggttgctttccttgtgtaggggatgatgatgtggtcatagattggtgctaggatcatgatgaataccaccgggaaaaccggtagcgaagacggtggaacctttagggaaccaagcttggtgtccattgtggctgcttgttcaacagagaatgtggacaattgagctaggcaacagttgaggatgatggtgcaagcaaatatgggtagcattttcaatactaccttgacatcttctacttgttgtacagtgcattctagtgatgaataccttggcttgtttgtaactgctttgttgagaaacttgaggttgcttgttggggtttcagttgttgtgcttgctttaacagtttcttgttgtgattctgttctacctgagtgtggattagaagggcttgaagtcatattcacaactgcactgctagtgtttttgtaggtgcagctattcagtaaagcagcaataagaacctgctcaaattcaaaacaaagaatcacataccatgctaaattattatgagaggggtataactcatgataatagtgaaagagaaatgggaaatatgaggctatcttataagagtaaatagtgtatgcattagtagtgtaaagagattttatagttatttaatcacaaactttttaagaaattttaaggaacagtggaagaaaaaaaatgcaaaatttgcttatctttaagagtaaatagtgtatgcactatcggtgtaaaaaattatatcatcattaaattacaatttattatatatgataagattattaatatttatataatcatttcaaaagtcatacctatcttaatttctgatttgtctacagtttaaaacttttgtattgacagtagatagaaattaaattaaactcttcttataaagtaaacaaatagcttaagtagaggttggtgcaatgaaagttacctttaaaatggttgtaagtgggcttcctgaagggatcttgttcttgtaggttggtgaaccggccaagaatactgggatagacacaaatatgctaatagtagatattgcaaaaccccattgccaccctttgttgtcttcaatccacaccacaaaagtaactgcaataagggcaccgcatgataggcagaagacgaagtagttgaagaaggttgatctctgcttcctcccagatggggtggtttcatcaaattgctcaccaccatgtgctggcagtgaccctttgattcctccaacccccagagccaccagatagaggccaatgaacaacattgctgctttgctaccattaacttcttgacatggggtgtctaagtcacactttggtggcttcaatgaaggatcacgagcttggatggtgagtacaatcagaccctgcacaaaaagtccaagttccttagccatgtcacgtttttgcaatatataacaaagcataacaaaaaggaaaaatgtgtcaacccttttagttgatttagtttctacattcaacatctgtaataaaatctcatgttcacagcttcacaactcaaatgaagggttttgggatctatagcacaagtatccagaaacaatcttgtttcaatcagaagtcagaacattcatacacaagactcaaatttttaactctaacctacaaaggactcatttgctttaaagaattgcaaaataattctagctagaattaattttataccatcaaaagtaattgagatgtatgccaaaattaatttcaattatgaatttaacttaaaacgttttgcaacagaaaaagaaattgactttaggtgtaaaaggatcagacactgaataggattagctacatgaattaaaatacgttagtcacgttattatgcttttttccataaccatctcaccaaagtcattcaattctagaggccattaacactagtaagtaattatacttcctgctttaacctctttttcttttcactaattttatgttgttctagttctagtagttaataacctcgttttgtttttgccatggttctggaaagggcttttatagaaggcccaaactaggtgcagacccggaccctccaagtccaaagtttgccccagttcatgggcccaatatgatgtacaacaaaacacaaaaagctgcaagaaaatatcatcaactggtgggtaccacttccaaatgttagacatcaatgcacatggcatgggcattgcgttgatcgcattagtgacacctaccaatctttttctaacccttatttccctctgtttttgctcaggaaagcaaaccaataaaatatcacaaatttgccagcggatatatgcttttggactacacatatatcataagtgtgcctactagtgcctaccatatttcctcgaatattagaccaataataaagaatgctctagtactatacacaaaaaaagttttcaacataaaacaaggtcctaggccacgtgtctatgcctccatccccacctcagtgtctggacctcgcacggacaaggacgtattataatccactattaacattttgttatgaaatgtcacttgtgctatgttggcgttttgagtaagttttcaatatgcgatatatatgtgaaagggtagtgataatcagataatggatcatcaaaatgacaaccacacacgtggttcacaaactttctttgcttaaaaaataactatgttaatacgtgaacttgccttatatgtgcctttaagacttctagaatttgtagattttagaaaagaaaaccttttagaataaaaaacaaagacatgaagacaaggtgttcattatgaccacaaagattttcaaggaccatgcactgctactagatgtagaaatggcacttaggcttggcatgaacatgatatataccaaccaaataccaatgaatcaattacttgatgttactaagtagtgcatagtacaccttagtatgcataattttatttttttctctaaggaatttattgacgaattcgcgagatgagctgttgaggctttggagcacacgttacaaattcttattcttattcacttggctatgatttataagctgttcccaaataatagcgtgaagtgaaaatgatgtcttaattaatttgaactcagatgttattgtcctgagttcatgtatttaaatggttaattgctccctggaaagttaattagcgctgacttaatattcctattttttattactccttctggtttttatatatttttttctatttcattaatatttctatttatatgtattgtttttaaaaaaatatatataattagtatattttaattatattcttatatctatttaaattttagataatttacacagttattataaataattttataattttaatataaacaaatatattaattacgtttttaatatgcgtgctatcttcttaaatagatactactagttaacagaaattaatagagcaaaaagattctggtcaaacatctcagtaaaaattgtttgaatattaattttatagctaaataaaaatttttatgattattaaatcatttaaaaataattaagagacgaggaagagttgtacaacagccagagtaagtgatcacgatgacacgtaatactataggcgagatttgaggagccaaaacgacaaaagttgatgcactaaacaaaggggtcctaggcacttgaggaaattaaatatacgttgcatgaaaaataatacgtgggtcctcttttatttaataaattaattaaagatatgctaacaagtcttttaaagataccttttaaaagaatcaagataatataaaattacttaatacattaaaaaaatattttctttttaacaattaataaaataaaacactctttagcctttataataaattaagcagcattctatatcatgtatatatatataattaatcttctcacatctttacttcatgtaacaccaaaaaatcatattatataaaaagacaaaatctccttccaccaatattattttatctcctccactccattaagcaaaaggataaagtcgtcggacactaacagccatattatgtgccctttccatttaactgatgttgtgagatgctgaccacaagatcaattatataattatgtgcatcatgctcatgcattactttttttttttctttctctcagctactctatttttcttccctggccaccactaagattgcaagttcgaggttataatttataacatatactagtatacattctttatggtgatatttttaattgggatcaattgagaagagacataaacctatgtaaatgattgtgtatctttttcctctcccccattttgtgccccaaactaataaatatattctagacttggtctgtttgttgacttgtatatatctgagtgggcattaattcatgcaattcataaggttttgttagacaacaagtgggggagggaattgcaacaaaagaaaaggaatccagggttgggataagtgttttttaacaccattcacattttcaattcttcgatgagaatttgataaattgcaccatttgattcaaccctaccctcctgcaagttgcaaacctttgcaactgactcttattccggtagacacgtcacatccttttgccggacacgtgttccttgagtcacccagaaaaaaataaatcgaaaatctcctttatatttaagtaaatcttctcctgtacaataaatattaaacaaattttatctgtttaaaatttataaagaaagagagaaacacaaaatttgatttcccatttctctgagtcacatatcatggaaaaggaaaaacaataagtgcaaaagcttgagttagacaaattaaggtaacttagtaggtaggtttgagttgagtgagagaaagtcgaacacaagacacaacatacacttacacaaacacagacaaagcataaagtgatatcatcatatcacatggagaaaacaagctagagtgtagtagtaataataataatgcattgcggtggcttaccaggaactcaataactgcacttatcaggtagacacgataagtggtgaaaaaggcatcggataagaaaccaccgaggagggcaagaagaaaggctgttcccatgaaattggtgacattgttcgcagactttgaaggtgacatgtgcatgtactgcctcaggtacaacaccaagttgctagcattggccaaaaacgccagattctccaatatctccgccactaataaacaaaacacaaccacctcggaaatcaatactagacatatcacaatgaatttgtctcatactaactattaaatttctatggtatgaccttatgaacattttatatttatcttaaactactttttttttgttctttaacataaaaaaaggactctggtcgaaatcgagtcctaaaaaccactaagattagtctaataacgagtttgaataatatgcatgctgatttaagtttgattctttttgtcgtcgttgtacataaaaagaaacggtgtccccattgaatttggcttaagatgcccctataaatgtgtgtatgagtgtgtgaaaatgaaattttttgagtaaaaaaaaaaaagaaaagattttgagactgacccagaacaaaggaggctgcaagcatgcctccatggcgacctctaagagcaggcttgttcctccaatccacatacccttcccatgtgctaacttgtggagcttctagttcctgcagaatttttattaattagaaattaagtgtcatattaatgcaacacaatatatatatttgggagagtaaaaaggagagagaaaattcaatccaacccaccatggtggttagattagtttggatctgagacacgttctatcgatggttaggacttaggggataaagagtggtgactgtgggtggtatttataggggaggtagagcgaagaagactccaatttggcggcataatggtcatcacgcaccacaccattaacattgaaattgactttaatccttcttttcacattcattttttttattccttgatatgtgctttgcatttgtttattattatattataataatgtttaatcttggattttaaataacgtattacaatgtgacgtcattagcgtaggtaatatgatactttaccttgtacaatcttttaatagttttacctgtgaatacgataacaccacgtacgcttttgtatatatttaaagtaaatacgtattttacactttatatatattaaaatttattatattcgtaacattttgtaagcttgattattgtaaaaaaattaacacttgaaaagtgagaaaatatatttgagaggataaagcatatatatacttataattgttgattagtaaattagagtgtgcatcaaattctataaaaatataactagctaaacaattaattaaagaggtctcattatttttcttttgaaaattttatgctttttgagtaggaaataagacgagcgctggcaaacacattctttaatagtataattttgtacaattatattgaaaaatactcccttcatatttaaataaggttagacatatgagttaaaatttgtttatattttggacattttttttacttatatttaagtttaaaagagtataaaattacgattgatatttattaaataaatagtaaaactcacacaattcaataattttcaacaaatttcaattaaaaatatgtaagagagtatgtgttattttttttatcggcagattgaagatatatttaggcttaattacaaattagttttataattaaattttattttcataaattttattacttaagtttttaatttttgtatatttcatcaccactaataaaaaatggatgattttgacatcataattataattaatgtaaaaaagttacatcataattataaatgatatagaaaagttgtttataacattggttataaccacaatgaatttagaaagtaactttttaatatcaattataactatttgatacacaaaaatctttgattttttatatcatttgtttagttatcaatgtgatgataaaatatataaaaataaaaaaaatttaaatgacaaaatttgtaaaatattaaaagttgaatgataaaatttgtgtagaaaaaaaaattataataaaatccataaaattatgaaaattagatgataaaatttgtgaaaataaaacttaaataattaaattcatgaaataattaaaatttgatatttaaaattaagtatattttataaaagcgataccagaagtactaaggtgaatatacaaaaattactaaagcaccaataaagagacaaagagagtatgtcgttaacatttctcaagaaatcgaggcggaaatatgttaaagttacactctatcttaaatacgtttctcacttaattttttttacatttaattatttcgatgttagattgcatcttaattaggaaattaattttacactagtataataattgaatatttgattttatttttaattaaataatttcgcagttgaagtagactgctcttcccaccaaaagtaggagtattagatccacgctgaaaatctaaaggagggcaagatattgtaataattgatagacaagtannnnnnnnnnnnnnnnnnnnnnnnnnnnnnnnnnnnnnnnnnnnnnnnnnnnnnnnnnnnnnnnnnnnnnnnnnnnnnnnnnnnnnnnnnnnnnnnnnnnnnnnnnnnnnnnnnnnnnnnnnnnnnnnnnnnnnnnnnnnnnnnnnnnnnnnnnnnnnnnnnnnnnnnnnnnnnnnnnnnnnnnnnnnnnnnnnnnnnnnnnnnnnnnnnnnnnnnnnnnnnnnnnnnnnnnnnnnnnnnnnnnnnnnnnnnnnnnnnnnnnnnnnnnnnnnnnnnnnnnnnnnnnnnnnnnnnnnnnnnnnnnnnnnnnnnnnnnnnnnnnnnnnnnnnnnnnnnnnnnnnnnnnnnnnnnnnnnnnnnnnnnnnnnnnnnnnnnnnnnnnnnnnnnnnnnnnnnnnnnnnnnnnnnnnnnnnnnnnnnnnnnnnnnnnnnnnnnnnnnnnnnnnnnnnnnnnnnnnnnnnnnnnnnnnnnnnnnnnnnnnnnnnnnnnnnnnnnnnnnnnnnnnnnnnnnnnnnnnnnnnnnnnnnnnnnnnnnnnnnnnnnnnnnnnnnnnnnnnnnnnnnnnnnnnnnnnnnnnnnnnnnnnnnnnnnnnnnnnnnnnnnnnnnnnnnnnnnnnnnnnnnnnnnnnnnnnnnnnnnnnnnnnnnnnnnnnnnnnnnnnnnnnnnnnnnnnnnnnnnnnnnnnnnnnnnnnnnnnnnnnnnnnnnnnnnnnnnnnnnnnnnnnnnnnnnnnnnnnnnnnnnnnnnnnnnnnnnnnnnnnnnnnnnnnnnnnnnnnnnnnnnnnnnnnnnnnnnnnnnnnnnnnnnnnnnnnnnnnnnnnnnnnnnnnnnnnnnnnnnnnnnnnnnnnnnnnnnnnnnnnnnnnnnnnnnnnnnnnnnnnnnnnnnnnnnnnnnnnnnnnnnnnnnnnnnnnnnnnnnnnnnnnnnnnnnnnnnnnnnnnnnnnnnnnnnnnnnnnnnnnnnnnnnnnnnnnnnnnnnnnnnnnnnnnnnnnnnnnnnnnnnnnnnnnnnnnnnnnnnnnnnnnnnnnnnnnnnnnnnnnnnnnnnnnnnnnnnnnnnnnnnnnnnnnnnnnnnnnnnnnnnnnnnnnnnnnnnnnnnnnnnnnnnnnnnnnnnnnnnnnnnnnnnnnnnnnnnnnnnnnnnnnnnnnnnnnnnnnnnnnnnnnnnnnnnnnnnnnnnnnnnnnnnnnnnnnnnnnnnnnnnnnnnnnnnnnnnnnnnnnnnnnnnnnnnnnnnnnnnnnnnnnnnnnnnnnnnnnnnnnnnnnnnnnnnnnnnnnnnnnnnnnnnnnnnnnnnnnnnnnnnnnnnnnnnnnnnnnnnnnnnnnnnnnnnnnnnnnnnnnnnnnnnnnnnnnnnnnnnnnnnnnnnnnnnnnnnnnnnnnnnnnnnnnnnnnnnnnnnnnnnnnnnnnnnnnnnnnnnnnnnnnnnnnnnnnnnnnnnnnnnnnnnnnnnnnnnnnnnnnnnnnnnnnnnnnnnnnnnnnnnnnnnnnnnnnnnnnnnnnnnnnnnnnnnnnnnnnnnnnnnnnnnnnnnnnnnnnnnnnnnnnnnnnnnnnnnnnnnnnnnnnnnnnnnnnnnnnnnnnnnnnnnnnnnnnnnnnnnnnnnnnnnnnnnnnnnnnnnnnnnnnnnnnnnnnnnnnnnnnnnnnnnnnnnnnnnnnnnnnnnnnnnnnnnnnnnnnnnnnnnnnnnnnnnnnnnnnnnnnnnnnnnnnnnnnnnnnnnnnnnnnnnnnnnnnnnnnnnnnnnnnnnnnnnnnnnnnnnnnnnnnnnnnnnnnnnnnnnnnnnnnnnnnnnnnnnnnnnnnnnnnnnnnnnnnnnnnnnnnnnnnnnnnnnnnnnnnnnnnnnnnnnnnnnnnnnnnnnnnnnnnnnnnnnnnnnnnnnnnnnnnnnnnnnnnnnnnnnnnnnnnnnnnnnnnnnnnnnnnnnnnnnnnnnnnnnnnnnnnnnnnnnnnnnnnnnnnnnnnnnnnnnnnnnnnnnnnnnnnnnnnnnnnnnnnnnnnnnnnnnnnnnnnnnnnnnnnnnnnnnnnnnnnnnnnnnnnnnnnnnnnnnnnnnnnnnnnnnnnnnnnnnnnnnnnnnnnnnnnnnnnnnnnnnnnnnnnnnnnnnnnnnnnnnnnnnnnnnnnnnnnnnnnnnnnnnnnnnnnnnnnnnnnnnnnnnnnnnnnnnnnnnnnnnnnnnnnnnnnnnnnnnnnnnnnnnnnnnnnnnnnnnnnnnnnnnnnnnnnnnnnnnnnnnnnnnnnnnnnnnnnnnnnnnnnnnnnnnnnnnnnnnnnnnnnnnnnnnnnnnnnnnnnnnnnnnnnnnnnnnnnnnnnnnnnnnnnnnnnnnnnnnnnnnnnnnnnnnnnnnnnnnnnnnnnnnnnnnnnnnnnnnnnnnnnnnnnnnnnnnnnnnnnnnnnnnnnnnnnnnnnnnnnnnnnnnnnnnnnnnnnnnnnnnnnnnnnnnnnnnnnnnnnnnnnnnnnnnnnnnnnnnnnnnnnnnnnnnnnnnnnnnnnnnnnnnnnnnnnnnnnnnnnnnnnnnnnnnnnnnnnnnnnnnnnnnnnnnnnnnnnnnnnnnnnnnnnnnnnnnnnnnnnnnnnnnnnnnnnnnnnnnnnnnnnnnnnnnnnnnnnnnnnnnnnnnnnnnnnnnnnnnnnnnnnnnnnnnnnnnnnnnnnnnnnnnnnnnnnnnnnnnnnnnnnnnnnnnnnnnnnnnnnnnnnnnnnnnnnnnnnnnnnnnnnnnnnnnnnnnnnnnnnnnnnnnnnnnnnnnnnnnnnnnnnnnnnnnnnnnnnnnnnnnnnnnnnnnnnnnnnnnnnnnnnnnnnnnnnnnnnnnnnnnnnnnnnnnnnnnnnnnnnnnnnnnnnnnnnnnnnnnnnnnnnnnnnnnnnnnnnnnnnnnnnnnnnnnnnnnnnnnnnnnnnnnnnnnnnnnnnnnnnnnnnnnnnnnnnnnnnnnnnnnnnnnnnnnnnnnnnnnnnnnnnnnnnnnnnnnnnnnnnnnnnnnnnnnnnnnnnnnnnnnnnnnnnnnnnnnnnnnnnnnnnnnnnnnnnnnnnnnnnnnnnnnnnnnnnnnnnnnnnnnnnnnnnnnnnnnnnnnnnnnnnnnnnnnnnnnnnnnnnnnnnnnnnnnnnnnnnnnnnnnnnnnnnnnnnnnnnnnnnnnnnnnnnnnnnnnnnnnnnnnnnnnnnnnnnnnnnnnnnnnnnnnnnnnnnnnnnnnnnnnnnnnnnnnnnnnnnnnnnnnnnnnnnnnnnnnnnnnnnnnnnnnnnnnnnnnnnnnnnnnnnnnnnnnnnnnnnnnnnnnnnnnnnnnnnnnnnnnnnnnnnnnnnnnnnnnnnnnnnnnnnnnnnnnnnnnnnnnnnnnnnnnnnnnnnnnnnnnnnnnnnnnnnnnnnnnnnnnnnnnnnnnnnnnnnnnnnnnnnnnnnnnnnnnnnnnnnnnnnnnnnnnnnnnnnnnnnnnnnnnnnnnnnnnnnnnnnnnnnnnnnnnnnnnnnnnnnnnnnnnnnnnnnnnnnnnnnnnnnnnnnnnnnnnnnnnnnnnnnnnnnnnnnnnnnnnnnnnnnnnnnnnnnnnnnnnnnnnnnnnnnnnnnnnnnnnnnnnnnnnnnnnnnnnnnnnnnnnnnnnnnnnnnnnnnnnnnnnnnnnnnnnnnnnnnnnnnnnnnnnnnnnnnnnnnnnnnnnnnnnnnnnnnnnnnnnnnnnnnnnnnnnnnnnnnnnnnnnnnnnnnnnnnnnnnnnnnnnnnnnnnnnnnnnnnnnnnnnnnnnnnnnnnnnnnnnnnnnnnnnnnnnnnnnnnnnnnnnnnnnnnnnnnnnnnnnnnnnnnnnnnnnnnnnnnnnnnnnnnnnnnnnnnnnnnnnnnnnnnnnnnnnnnnnnnnnnnnnnnnnnnnnnnnnnnnnnnnnnnnnnnnnnnnnnnnnnnnnnnnnnnnnnnnnnnnnnnnnnnnnnnnnnnnnnnnnnnnnnnnnnnnnnnnnnnnnnnnnnnnnnnnnnnnnnnnnnnnnnnnnnnnnnnnnnnnnnnnnnnnnnnnnnnnnnnnnnnnnnnnnnnnnnnnnnnnnnnnnnnnnnnnnnnnnnnnnnnnnnnnnnnnnnnnnnnnnnnnnnnnnnnnnnnnnnnnnnnnnnnnnnnnnnnnnnnnnnnnnnnnnnnnnnnnnnnnnnnnnnnnnnnnnnnnnnnnnnnnnnnnnnnnnnnnnnnnnnnnnnnnnnnnnnnnnnnnnnnnnnnnnnnnnnnnnnnnnnnnnnnnnnnnnnnnnnnnnnnnnnnnnnnnnnnnnnnnnnnnnnnnnnnnnnnnnnnnnnnnnnnnnnnnnnnnnnnnnnnnnnnnnnnnnnnnnnnnnnnnnnnnnnnnnnnnnnnnnnnnnnnnnnnnnnnnnnnnnnnnnnnnnnnnnnnnnnnnnnnnnnnnnnnnnnnnnnnnnnnnnnnnnnnnnnnnnnnnnnnnnnnnnnnnnnnnnnnnnnnnnnnnnnnnnnnnnnnnnnnnnnnnnnnnnnnnnnnnnnnnnnnnnnnnnnnnnnnnnnnnnnnnnnnnnnnnnnnnnnnnnnnnnnnnnnnnnnnnnnnnnnnnnnnnnnnnnnnnnnnnnnnnnnnnnnnnnnnnnnnnnnnnnnnnnnnnnnnnnnnnnnnnnnnnnnnnnnnnnnnnnnnnnnnnnnnnnnnnnnnnnnnnnnnnnnnnnnnnnnnnnnnnnnnnnnnnnnnnnnnnnnnnnnnnnnnnnnnnnnnnnnnnnnnnnnnnnnnnnnnnnnnnnnnnnnnnnnnnnnnnnnnnnnnnnnnnnnnnnnnnnnnnnnnnnnnnnnnnnnnnnnnnnnnnnnnnnnnnnnnnnnnnnnnnnnnnnnnnnnnnnnnnnnnnnnnnnnnnnnnnnnnnnnnnnnnnnnnnnnnnnnnnnnnnnnnnnnnnnnnnnnnnnnnnnnnnnnnnnnnnnnnnnnnnnnnnnnnnnnnnnnnnnnnnnnnnnnnnnnnnnnnnnnnnnnnnnnnnnnnnnnnnnnnnnnnnnnnnnnnnnnnnnnnnnnnnnnnnnnnnnnnnnnnnnnnnnnnnnnnnnnnnnnnnnnnnnnnnnnnnnnnnnnnnnnnnnnnnnnnnnnnnnnnnnnnnnnnnnnnnnnnnnnnnnnnnnnnnnnnnnnnnnnnnnnnnnnnnnnnnnnnnnnnnnnnnnnnnnnnnnnnnnnnnnnnnnnnnnnnnnnnnnnnnnnnnnnnnnnnnnnnnnnnnnnnnnnnnnnnnnnnnnnnnnnnnnnnnnnnnnnnnnnnnnnnnnnnnnnnnnnnnnnnnnnnnnnnnnnnnnnnnnnnnnnnnnnnnnnnnnnnnnnnnnnnnnnnnnnnnnnnnnnnnnnnnnnnnnnnnnnnnnnnnnnnnnnnnnnnnnnnnnnnnnnnnnnnnnnnnnnnnnnnnnnnnnnnnnnnnnnnnnnnnnnnnnnnnnnnnnnnnnnnnnnnnnnnnnnnnnnnnnnnnnnnnnnnnnnnnnnnnnnnnnnnnnnnnnnnnnnnnnnnnnnnnnnnnnnnnnnnnnnnnnnnnnnnnnnnnnnnnnnnnnnnnnnnnnnnnnnnnnnnnnnnnnnnnnnnnnnnnnnnnnnnnnnnnnnnnnnnnnnnnnnnnnnnnnnnnnnnnnnnnnnnnnnnnnnnnnnnnnnnnnnnnnnnnnnnnnnnnnnnnnnnnnnnnnnnnnnnnnnnnnnnnnnnnnnnnnnnnnnnnnnnnnnnnnnnnnnnnnnnnnnnnnnnnnnnnnnnnnnnnnnnnnnnnnnnnnnnnnnnnnnnnnnnnnnnnnnnnnnnnnnnnnnnnnnnnnnnnnnnnnnnnnnnnnnnnnnnnnnnnnnnnnnnnnnnnnnnnnnnnnnnnnnnnnnnnnnnnnnnnnnnnnnnnnnnnnnnnnnnnnnnnnnnnnnnnnnnnnnnnnnnnnnnnnnnnnnnnnnnnnnnnnnnnnnnnnnnnnnnnnnnnnnnnnnnnnnnnnnnnnnnnnnnnnnnnnnnnnnnnnnnnnnnnnnnnnnnnnnnnnnnnnnnnnnnnnnnnnnnnnnnnnnnnnnnnnnnnnnnnnnnnnnnnnnnnnnnnnnnnnnnnnnnnnnnnnnnnnnnnnnnnnnnnnnnnnnnnnnnnnnnnnnnnnnnnnnnnnnnnnnnnnnnnnnnnnnnnnnnnnnnnnnnnnnnnnnnnnnnnnnnnnnnnnnnnnnnnnnnnnnnnnnnnnnnnnnnnnnnnnnnnnnnnnnnnnnnnnnnnnnnnnnnnnnnnnnnnnnnnnnnnnnnnnnnnnnnnnnnnnnnnnnnnnnnnnnnnnnnnnnnnnnnnnnnnnnnnnnnnnnnnnnnnnnnnnnnnnnnnnnnnnnnnnnnnnnnnnnnnnnnnnnnnnnnnnnnnnnnnnnnnnnnnnnnnnnnnnnnnnnnnnnnnnnnnnnnnnnnnnnnnnnnnnnnnnnnnnnnnnnnnnnnnnnnnnnnnnnnnnnnnnnnnnnnnnnnnnnnnnnnnnnnnnnnnnnnnnnnnnnnnnnnnnnnnnnnnnnnnnnnnnnnnnnnnnnnnnnnnnnnnnnnnnnnnnnnnnnnnnnnnnnnnnnnnnnnnnnnnnnnnnnnnnnnnnnnnnnnnnnnnnnnnnnnnnnnnnnnnnnnnnnnnnnnnnnnnnnnnnnnnnnnnnnnnnnnnnnnnnnnnnnnnnnnnnnnnnnnnnnnnnnnnnnnnnnnnnnnnnnnnnnnnnnnnnnnnnnnnnnnnnnnnnnnnnnnnnnnnnnnnnnnnnnnnnnnnnnnnnnnnnnnnnnnnnnnnnnnnnnnnnnnnnnnnnnnnnnnnnnnnnnnnnnnnnnnnnnnnnnnnnnnnnnnnnnnnnnnnnnnnnnnnnnnnnnnnnnnnnnnnnnnnnnnnnnnnnnnnnnnnnnnnnnnnnnnnnnnnnnnnnnnnnnnnnnnnnnnnnnnnnnnnnnnnnnnnnnnnnnnnnnnnnnnnnnnnnnnnnnnnnnnnnnnnnnnnnnnnnnnnnnnnnnnnnnnnnnnnnnnnnnnnnnnnnnnnnnnnnnnnnnnnnnnnnnnnnnnnnnnnnnnnnnnnnnnnnnnnnnnnnnnnnnnnnnnnnnnnnnnnnnnnnnnnnnnnnnnnnnnnnnnnnnnnnnnnnnnnnnnnnnnnnnnnnnnnnnnnnnnnnnnnnnnnnnnnnnnnnnnnnnnnnnnnnnnnnnnnnnnnnnnnnnnnnnnnnnnnnnnnnnnnnnnnnnnnnnnnnnnnnnnnnnnnnnnnnnnnnnnnnnnnnnnnnnnnnnnnnnnnnnnnnnnnnnnnnnnnnnnnnnnnnnnnnnnnnnnnnnnnnnnnnnnnnnnnnnnnnnnnnnnnnnnnnnnnnnnnnnnnnnnnnnnnnnnnnnnnnnnnnnnnnnnnnnnnnnnnnnnnnnnnnnnnnnnnnnnnnnnnnnnnnnnnnnnnnnnnnnnnnnnnnnnnnnnnnnnnnnnnnnnnnnnnnnnnnnnnnnnnnnnnnnnnnnnnnnnnnnnnnnnnnnnnnnnnnnnnnnnnnnnnnnnnnnnnnnnnnnnnnnnnnnnnnnnnnnnnnnnnnnnnnnnnnnnnnnnnnnnnnnnnnnnnnnnnnnnnnnnnnnnnnnnnnnnnnnnnnnnnnnnnnnnnnnnnnnnnnnnnnnnnnnnnnnnnnnnnnnnnnnnnnnnnnnnnnnnnnnnnnnnnnnnnnnnnnnnnnnnnnnnnnnnnnnnnnnnnnnnnnnnnnnnnnnnnnnnnnnnnnnnnnnnnnnnnnnnnnnnnnnnnnnnnnnnnnnnnnnnnnnnnnnnnnnnnnnnnnnnnnnnnnnnnnnnnnnnnnnnnnnnnnnnnnnnnnnnnnnnnnnnnnnnnnnnnnnnnnnnnnnnnnnnnnnnnnnnnnnnnnnnnnnnnnnnnnnnnnnnnnnnnnnnnnnnnnnnnnnnnnnnnnnnnnnnnnnnnnnnnnnnnnnnnnnnnnnnnnnnnnnnnnnnnnnnnnnnnnnnnnnnnnnnnnnnnnnnnnnnnnnnnnnnnnnnnnnnnnnnnnnnnnnnnnnnnnnnnnnnnnnnnnnnnnnnnnnnnnnnnnnnnnnnnnnnnnnnnnnnnnnnnnnnnnnnnnnnnnnnnnnnnnnnnnnnnnnnnnnnnnnnnnnnnnnnnnnnnnnnnnnnnnnnnnnnnnnnnnnnnnnnnnnnnnnnnnnnnnnnnnnnnnnnnnnnnnnnnnnnnnnnnnnnnnnnnnnnnnnnnnnnnnnnnnnnnnnnnnnnnnnnnnnnnnnnnnnnnnnnnnnnnnnnnnnnnnnnnnnnnnnnnnnnnnnnnnnnnnnnnnnnnnnnnnnnnnnnnnnnnnnnnnnnnnnnnnnnnnnnnnnnnnnnnnnnnnnnnnnnnnnnnnnnnnnnnnnnnnnnnnnnnnnnnnnnnnnnnnnnnnnnnnnnnnnnnnnnnnnnnnnnnnnnnnnnnnnnnnnnnnnnnnnnnnnnnnnnnnnnnnnnnnnnnnnnnnnnnnnnnnnnnnnnnnnnnnnnnnnnnnnnnnnnnnnnnnnnnnnnnnnnnnnnnnnnnnnnnnnnnnnnnnnnnnnnnnnnnnnnnnnnnnnnnnnnnnnnnnnnnnnnnnnnnnnnnnnnnnnnnnnnnnnnnnnnnnnnnnnnnnnnnnnnnnnnnnnnnnnnnnnnnnnnnnnnnnnnnnnnnnnnnnnnnnnnnnnnnnnnnnnnnnnnnnnnnnnnnnnnnnnnnnnnnnnnnnnnnnnnnnnnnnnnnnnnnnnnnnnnnnnnnnnnnnnnnnnnnnnnnnnnnnnnnnnnnnnnnnnnnnnnnnnnnnnnnnnnnnnnnnnnnnnnnnnnnnnnnnnnnnnnnnnnnnnnnnnnnnnnnnnnnnnnnnnnnnnnnnnnnnnnnnnnnnnnnnnnnnnnnnnnnnnnnnnnnnnnnnnnnnnnnnnnnnnnnnnnnnnnnnnnnnnnnnnnnnnnnnnnnnnnnnnnnnnnnnnnnnnnnnnnnnnnnnnnnnnnnnnnnnnnnnnnnnnnnnnnnnnnnnnnnnnnnnnnnnnnnnnnnnnnnnnnnnnnnnnnnnnnnnnnnnnnnnnnnnnnnnnnnnnnnnnnnnnnnnnnnnnnnnnnnnnnnnnnnnnnnnnnnnnnnnnnnnnnnnnnnnnnnnnnnnnnnnnnnnnnnnnnnnnnnnnnnnnnnnnnnnnnnnnnnnnnnnnnnnnnnnnnnnnnnnnnnnnnnnnnnnnnnnnnnnnnnnnnnnnnnnnnnnnnnnnnnnnnnnnnnnnnnnnnnnnnnnnnnnnnnnnnnnnnnnnnnnnnnnnnnnnnnnnnnnnnnnnnnnnnnnnnnnnnnnnnnnnnnnnnnnnnnnnnnnnnnnnnnnnnnnnnnnnnnnnnnnnnnnnnnnnnnnnnnnnnnnnnnnnnnnnnnnnnnnnnnnnnnnnnnnnnnnnnnnnnnnnnnnnnnnnnnnnnnnnnnnnnnnnnnnnnnnnnnnnnnnnnnnnnnnnnnnnnnnnnnnnnnnnnnnnnnnnnnnnnnnnnnnnnnnnnnnnnnnnnnnnnnnnnnnnnnnnnnnnnnnnnnnnnnnnnnnnnnnnnnnnnnnnnnnnnnnnnnnnnnnnnnnnnnnnnnnnnnnnnnnnnnnnnnnnnnnnnnnnnnnnnnnnnnnnnnnnnnnnnnnnnnnnnnnnnnnnnnnnnnnnnnnnnnnnnnnnnnnnnnnnnnnnnnnnnnnnnnnnnnnnnnnnnnnnnnnnnnnnnnnnnnnnnnnnnnnnnnnnnnnnnnnnnnnnnnnnnnnnnnnnnnnnnnnnnnnnnnnnnnnnnnnnnnnnnnnnnnnnnnnnnnnnnnnnnnnnnnnnnnnnnnnnnnnnnnnnnnnnnnnnnnnnnnnnnnnnnnnnnnnnnnnnnnnnnnnnnnnnnnnnnnnnnnnnnnnnnnnnnnnnnnnnnnnnnnnnnnnnnnnnnnnnnnnnnnnnnnnnnnnnnnnnnnnnnnnnnnnnnnnnnnnnnnnnnnnnnnnnnnnnnnnnnnnnnnnnnnnnnnnnnnnnnnnnnnnnnnnnnnnnnnnnnnnnnnnnnnnnnnnnnnnnnnnnnnnnnnnnnnnnnnnnnnnnnnnnnnnnnnnnnnnnnnnnnnnttagcaccaaaacatatcctgagttggggaggttgttgatgtatttttattacctatgttactatgtacagttacctgcaggttttgtaatttggtcacttcttgcgacaaactacagccagctatttatgagtaatatatattatccttttttatgtgaattaaaaaatgccaagaagcatgaaattaattgagtctgagacgagactactacagtctacaacgtgtttactctacctatccatggaattggaaccgacgagaaaaggacaaaacagaacattaacacatttaactacattataaatagccacatgaagcaagagtagtttatatgtagcgcaataactatattatatataccatgaatatacaacaaccgatacagatatatagaactaggtttacaaaaaggacgtttgtgtttgacctataaagaatgtgatatacacggttttctcaaagctttatgggaggataacggttaagacctcctttcaagcatttctcctattaaagtcatgatgcagatattttaacaaccatcttgctgatacatgaagtaatgttatatcctattataagttatttaacacgttttttaatattttataaaatattaaatggaaagtaaatataattaatgtcttgaaaacataaaaaaaatagtaaaaagagttgtagaagaaattaaaattatacaaacattggtttttaaggttgtttttaaagaataaaaaatagtgtgattttataaaagagaaagtatttatcatattaaaaatacagtgtaataaattcttactttttacaataaaattttactattttcagttgcttaaaatcatgttttattttttatgggtagataattgatattaatatttttccttttaattatattactccctcgaatttttttatctgtttacttaagaaaataacgtacaaatttgaaaaaaaaattaatatagttatttatatcaaaattattttaagctttttaacatgatattactattatttctgtcctaaattaaaaaatactattatttctttttcatttatgacaaatgtataaaatattagttaaagatataactatcctaaacttttagatagacaaataaaataaaaattcattttaaaaaattgacaattacaaaaaaaaagattaaataattagtgcacattagtgtaaatgtattttatactgtcacaaacagtcatatagtaagttattgacttttgctgttttttttagtagttgtcaatgtaaaactttttacatattatcctttgttaataattaaaaacttttttattagttgactttgtatgcatgtacctcaaactcaaatagatacctattatcctttgttagttataatctcttttcattaatttgagagggatcttattagtgaaagcaaaacaatgtctgttatacaatagtacacatataaaacttcttatttaataataaaaaaaacgtaatggaaattatgtcaaaaaaatatattattaacattattaatttataaggtgaaatattccaattcaagcacacgagcaacagggtgccgcgccattcgggtcaaattgctttcgctcattattgtattgtagaatagaaaacgttaataaattatgaagccaatcgatgaagacattttctgtttttctctttcttaccattttcttctaaggtcatatgtatcacatacccacgcatagcactacataacaccgacggcagggtttaccataccccaacccatgtcacaagtcatcacacagtcttagttttttttttttttaaataaaaaaatgttaattattaatttttgttagtgaaagatttgaattcatagattatctttctttatttcattttttatcactaaattaaccttatagttatatttccaagtctaagtcattttatttttaatttttgagaaaactttttttctattttagaacttaatctatttaatgtcaatttgctcagcagttcatatggaagaattttggaagacaggttgattttttaggatatatttcagttttaatttacatgaattttagtatattatatttttttattagcatattattatacaaaataatcatttattttatccataactaatttacatatgagaatttagttagttatgatgtttttccggaaaattcaaacttaaaattttatttaaaaaaattgaatctaatagtacgtaggttagcttatcatatcttgttactcatatttagtaaaaaaaaattaaagcttttttttactaaacaattacatgtgattttcatggtctatatatctgttttgtgtgctggtagtcactacataagtagtaataaaacccacctatagctaggaaaatactgtcatttgtctattcatacaattttttttttgtgtcttatttgcctgatataacaattgtgtggaatgatagttaatacttaattgataaggataaggtagtgtcggagcagagccttccttgaccatcatcggtggttttggttttgttaatgagtttttttgtctaaaagtaggaataaaagtgtaaaatatgttttttttttcttttaaaatttttaaattttaattttaatccttttagtaaaagttatttgttttttgttcctttaaatttaaaatgcatcattttaattcttaaagtactttaaatcacgttctataaggggtgaaaaacagttaagtagcgctcaaaatgaaaaaataaatagaaacatttccaaattaaatagattaaaaatggataaaaaaatatttagaaaaacaaaaccaaactttgataattttagagtgataagaatatatttaacccaaaataaaaaaaagtatatagttatgacactatctcgttctgctctcattaatttgtttattcaatccctcaaacacagtatatgaattttaattaaaggcttaaataatttttagagtcatgatatatattggattattattttgagtttttgataaatttatataaaagttattgagatgatattacattatcccttaaataatgtcatgaatttgaacaaaatttttaatatattagagactcaaaataaaaaaaaattcaaagattcaactaaatttatatatatatacacatatatatatatatatatatatatatataaaagatctcaaacacatttaacttttagagggacctaaatttttaacttaagatctacatagtattcattaacatctttagctatcccactaagcttaaccttgcagtgggggccggttaaggttggattacatgcataagaacttaagattaatttttattgttattaaaaaaaagtcatcattaattgtcaacattctcagccatcgaattatatatcctttgaaaacataatcaagattgttcttattggtggtcattaatattttgaatatgtggccactaattaatatcatattcactaatttattatggtggataattaatatagaagatgtgcttctacaattgattattatgataacaactccaacgagaacaattgattattacgaaaacacatgagaacaaacagtgataactcttcaaacaagattaaaaataataatttgttaagattaaaactcaattataaatctttcttatgaaattattagaattatcatcatattgggtggtaacaacgatattagaaacctcagaagtgtctataattgggtttttaattaatgtcaataatttattattttaattataatttaaggattgttattgtttattatgacacgtgcacgcacagaaagagagaaagagttattataatttatcaatatattttttagtcagagtacattaataaaataaatcgtcaatatatttaaaaataatctttacttataatttattaatttattctcactaaaaaaaacaagctattcttattggtaataaccttgaactttcaacatcaaccataatcatcacatctaacttttatcaagactcgatcaaacatagtagtaaaaccatagtatcgattccaatgaatcaatccgtaatgctcatatgctgctttgcctcctacctattaatctgaaatattgcagatgcaattatattttgccacgaaacaaagtgactccaacaagacatgactctttcattatgagttcagtactacctgacaaagtggtttgtcaaagtgactgtagagtttccctattagtatgacaacaaccgattccacaaaaaatagttattatccatgttaggaaacgtggccgagagagatgacaaatcagagaggatcatatcagaattctagtgcttgtaacctagaaataaaaaacattcttatgatattcaacaatgtggataaagaaagaacacaagcacactatactgttgtaaagatgaagagtagattataaaacccaatttctcagaatatgtcatatattattctcatcatgtggcccacaaagttaaaccaagtatagatgccaccaaatctgtgagtgaaaatacacatacgtaaagtgttcacaaccaacagttgcaactgccgcacacaaaaattcttattctgtggcacagaaataaaatggcatcttttaatttgctttggggaacctaatcacctctttattataattgcttatccgtatattatccctagcaccctctctgctccccccttgtttctctggtcattattctccactgaatatgaagagtttagaaagttcagttagattcatctgtattctatttaattaaacttatcccccgccaatattgacacttgaaattgaagatattgacgagtttatggttacttttttcatcattcacattaaacgtggaactcattcctcgttaaaattaataaagaaaagaaacgagagggttactatgctatagggaattataatactgtattaagtatttttttttgtgattgtctatttaaatttctaagtcctttttattcatgcatgaaaatgcaacattaaaatttgttaccacatgggtagaatatattcgcctagttatttttttaatataaacattttactaagtgatttgtaaaatcttttacatttgcctttaatataattatctcgctgatttaaatgtctttttggtcaaattctaacttacgatagaatgtaacgtgaatgaaaattcgtgatttgaatggaataattgccatacataaccaaagcatatatattgatcatgtctaatctctaagtatttacattcttatgtataataagatggaaaaaaaaaaagatgatgcgtgtgacgaatcaaacaccttttaccttatcacattgatacccttcctttaattagcaaactacacgtgatagttctaaaagtaattattttctttattttatatatactgcaagtgcaatgtgaacttcaagacaatcaagtaaaatatctaaagatgcacagtgattgagagaatatctatggggtaatatatattcacatttccttttgtaaaaggtgtgaatagtttttttcttcctctcgtattattaatttcaaatcaacgaagaagtatttgtttagcattcaataaagaaaagaaacctacggctatgtttgattttagaagataaatctcttaaaagatgcttccctttatttagtcaagataagattcaatttttaattcatacttttttaaacagagttgttttccttaattaatttaatcaactgtttgtttcagcagttgttacgacacatgccaacggcggcggcggcgccttcagttatttagcgaagattcctctagcgataagattccaattaattactctgtatagtttcaaaagtttgttaaagcagtgatatatattgtaagactattatctttagaataatttgaacgaattttccttgaatgacttacaaatcaagaagaagaaaaaatcttacactttatgatcaattatctatttacttttgtactttatttttctctaattataattatttaatcctcatttgtgacagttttcatacaaaaatagtgttccaacgttctttattggattatatcacctaattatacgacttctagttctagcaaagaaaaaactatcaatggaagttttttattgtcagagtgagtcagtatcaaattatatataactctttgcaaatttgagagtactctgttgcataccaagcagtcctgttatcttagagaaggtgtggttttaacttttattaatgtataatctcatgtagtcatagtttgtcaaaaataaaaataactgatctttgataaatattacttctatactgagctgatatcacagctaaaagtttattttcttaatcaataagcatttttatctaaggtatgtgttttgaactattgcagcttggtacgaaattgtgactaaaagtatcattttgtttcaaaataggctgacccaatataaaaatattaactaagtgtcaaatagatgattcagatacttcctaattaaaaattcaggtaccattcaatattgttaagtttgtttttaaatgtatacaaagtcatatctataacatttttatataattaaattcttgggcaaatcaataacttcatatattgagtgtttcttttttcattgtgagtaatatattctggttttcaggttgacagtagttccttcctgagcggatctaaacaaatttgttggaattttactcacaatattgaaatctagctagattcctccaaattcaaacgcatgacttaacatgagatgccgactgtgtgatcatctggccaaaatatttgtgggtttatgattctctacataaaatctgtttagacgaagtgttttttattaaaaacaccaaatttatttattccttgtattattagaatttttaagactatattgagacacatttggaattgagaattattatcatgttgttggaattaaaataggagctaatataaaaaaagttataataaactttgtttagagagttaacctctgtggagcccatttactataaatttatttgtttgttagaaagtccaaaacaattgttagaaagttccatagttttatccaaattatggtttagacattcccaacaaaaaatcaaattacttttattcaactctattttcttattacatgcagtataatttatgtattcctttacttgaatgcaatacttggtctggaaaaattaaaatgcaacactttatgcccatgcaaaatcaaaagccatatggcctgaagctttcaacacgaggtggtgggttattggtagcttccttgcaataagtaacttcattagacctgagatcacacattgtgtgacctttatgtcaattcatgcacaatttttcttgatatcattggacagctaattaagagaatttggagataactctgtatgattttatcttatgatctttatgaggacacctccagctccatttgattcccttctgttatccaaactctggttcagacgttcctggtgacatacaggaaattaattaacatctagtcattatttattctttgctttaaaattaaacttgatctcttggacatgaaagaaataatctataatttccggatctaacacaggctaaatatgcaatctaactttagtagtgtcaaattgcttcatagtttagatacaataatatatatatatatagatagatggatgtatgtatgtatatcactgcagctgcagcagattgatgtaataattgaagtgttgttatggtatgctctagatgctaattctattcgccattctagagagcttcaattctgacttctgagacattttatttttattgcagttatgtcattttttttttacaatagtcacactggagttaaaaattatgaactaatgcatattattcaaaatttcaccactaagctgaccttagtggttgagtttcgtcgaatttaatttaatttcaagtgtgaatagaatatatgagattttccatttgcctctcgacaaagcaaaggccccttgaatgtgtgtaccatatttcacacaaacagaaatagatcaaattctgtagatcaccatctggcatattttgttttaagtgacgacattgtttgacttacataaaatttcattatcgttgcatatatttattaattaattaattaacaagatgatatagtagctagagagtggaacaggattggtgcagggtgaagtaaacctaggtgaatagaaatcatgacacgaatcattttttttttctttctaacgacttttgttgcgtataaagtggtcgctcaattttttttattctaaaaaagttcaaacaaaacgaaattcgatcttagcaaggcaaagtcggtgtattagcttaatttaggctctactatacaacttaaatattcatttttttcactaaaaaaaatttgtgtttatctcaagtgactctctaacacgtcacattgaatcaataacaatcttataagttaaatatattaaaagattctatttctacctattttttatatttttgaaagaagtcactgtgaaggagaactgccaaagtcaaacagtaatgtgactcttacaaaattttataaaaatttcaaattttcaatatattattacagtgtttagtaaacattcaacggcatatatgaagataggcgtacattatatttttattaataaaaatagctgtataactactataacttaatatgcaggtacgtactatcgcaagctgcacgtgtaaaggacagaaaaagccgcaaattattgtgaacagaaatattcacgtaaagtaattgttgcttcagtgggtggtcttggtagcttgttagtattattttcaatatttgttttgtagttttctattagcagtgcattagatctagctggagaggcattgtcatgagaccctgctatgcaagaacggctgagtatacgactttgaatccttgcttcattatattttctttcttcttcttcttcttctttctttttttaagaagattgtcctcacttcttaaagaaatctttgaaagtattcatttcgtgaatttatgtttaaaatataacatatgtaattttcacggtggtaattagtttgagacgagtaaaattatttatgatcgactagaacttgaaataacttattatgttgaaataatgttgtgtcagataatctatgctttcggtgatagaggaacagcaaattattaactttaaaaagattcaattattattttaaacattaaaatgcaatgctaatctccctaatttggattatgtgctttttgatctccaagttttagttatttaagttttccaattcttaaaattgagtataaatttaaattatcacgatcctttacttaaaatcctcaaattgtttattttcttccaaatatttaacggtttgtgatggttttgtgattgaaatagttttgaaaatttagaagaaatttagtataaaaaaaattgataaaatttgaggaatttcataagatgtaaaattaaggtcttcaaaaaacaacgcatcgggtgaaatatgatattttgttaatttggtgaattttgagtcaaagtcaatttaatttaaaaattagtaaaaataatgagaatttaaggattttaagtacaagtaagagaccaaatttacttaatttttaaaaaagtttaataataaaaaaaatatttttttataaacaacaagtattacttattgtaaaaagagtatcttctaattgagacaatcatatttgactcaagtaaaattattgtatagatgataaaaaaatttctttaaatatttaacacaaatgtaatgattaagttgaaacagcattacaccaattgatctataaatttggtggcaatatgtactctaaagataacagttaaaatattaaaaacattttttattaaaaaattttataatgtatttttgcataatttcaatgcccctgcaacatatttttcgatatatgttttagtaatttttggacaagtattttttatcaacgttaattgttaatttgttaatctttattagtaagaagaatttaaacccatgacttttttcctatcttttctccctttaccaagttaaccttatatcttttttctttttttacaagtatattaagtactggttagtaaaattctcttcaaaataaagcaacttaattaatttataaaaaaattacaaataaaatcacatataatgtgcactagtggaaccaaaaaatacttttaagcatatattataccattatacaaaagcttagccaccagtccaaaacatataaaaagaatatgttaaaaaatattttatgttccaagatcgatctttcactaacataaatgaaagtgtgatataaacccatagaacaaattgctagctgagtgcaagcgtacctaacgggttgatatgaattttattaaacttggagaatatagtattgagatttgaaatgttaaaaatacttatttgatatctgaaattaatcataaaattgaaattaaatttattaatttaaatttatagaattgaaagtctttaaaaatcaaatttataatgtaatatcattattttatcaattaataaaaaatattaattttaattatatagctgaaagtatttaaaaatcaaaattataatttaatatcatgattttatcaaataacaaaataatttgctcccgttctttctaattcttacttatgtttgtttcggatcatcaagaattgattttgaaaaaaaaaactatacttcaaatatatttcattaaaattccttgtaaacattttagtaagttttaaaaagttattaaaatttaaaaaatattatcctatattatgttcagttgggtctacctaaaataagacccaagcccaattataaaaattatggtgtccaatttctattacctaaacgcagtttaactacttttttttcaaaccaaattctcaaattgggcttaaccgtcattcttccaagggagttgctattacaactatctgtattgctatttgtactaccaaccaaatgatcattttacccttatgagttttcctacacccacaacccttctcctttcctctctcacttctcccttcctctttcatgacacccccaaccatttccattactaattcatctcctcgtctctctcgtcaaacccattcaagacaaggtaagttttttttttcttaccaatgaaatcacaattatgttgtatctttgacgaaatcatgattttgttttgcattttgacgaaaattttgacagagtggtgatgaattaggaaaggggttattgttgctcacaatgtaggaagaaaaaagggaatgtagaaaccaattgcccttcaatccacccaagtgaaaacatttttctttacattgcccataaaagttttgatggatgtgacttgaatcctgcacctcctttcttgaatcatgcacaacccattattcagtgaaaaaacaatcatacccttaatgaaattttcaccttccatctcccaatcctaacaactcccttctacctatctcaattctaacccccctcccccatgatggcatctccctccctcggtggtcaccacccacaacgacatctccctctcgctccttcctcctgagaaggtaaatggcttctctaatcaaatttaatttactgtaaaatagtttctagaatggcaattccataagaaaaaactttctgaaatgatcttttcatatgcaaaaaaaaatccgaaatgacctttttgtcaggcaaattttttttccagaataattgttctagaagtatttttgcttacggaaaggtgatttccaaagacatttttcaaaacttggaacaacctttctagaagtttattttatatattctgaaaagagggattcaaaaatcaatatggggctcacgaaaagtccattttggaagcaaaaactataatctagagtttaattttaacctgtacaaaagaatctatattattattcatacttctatatttgtaacaatctcttcttatattgtcatctaataacaattcattatgtatgataagtttgttgacttttaaaataattattttaaagtaattcaaacggtgatttgtaattggatgcaggtgttgtgaataatgcaggttttgatgatgctgagaagaattcacttgctaatgatcataaaagaaatgcttaagcttcatgagataaattgaactcgatatggatgctttatcatgtcttatgcatcaacaaaatggaaagaatagggcattgatagacttattggtcaattatccaagtaaaaccatggttatacagagtgttaatgatcttgggtttataaaggggttgaagttgtttgaactcttagacttttttgttgaagagattggagaacaaattattgtcaagttgtggccaacaacgacgatgactatgtcttgccaggtaaaagtgtttaattgttcatttttttcaattgctttatgtgacaattagttacttatttagtttattaattttgtctcaaggaaatataagacaatgtttgcaacgacaaaatcttagacatggtgggcaagatttgaaaaccaagtggttgctatcaatggcaaaattaagtgagatttgagatatgagagctaaggtaaagatcaaagacaaatatatagaaattaatgacctggttgacaacttacaccatgcagtactagtgtgagaaggtcctcaaagaaataaggaaagaagaagcaatcaacaaagaaagggatgaaagcaattgattcgagttggaattttcaattttacaaagttgtaacccaaaacttaaattgaacgagaacaaattgcgaaacaaaaatagaatcaaaccaattacctgaatagaatcatgaaaatattgagtttaatctaattttcaacctaattaaacttaattggattgagttggatttacctttttttaactacccaattaaacctcaattaggttgggttgggtcatcaggttgaataatttaaaaaatgttatctttttaaccttttaacaaaaaatacttcaaaataagtaattcaacattgtttcattgcttcttaattcttataaagcccacaattagtattatttgcctcattattttacaagtcacaattattatattgagtcaatatccaaaatcaaaataaattgttgcaacttgcgagtaaacaagagtgagagagttttgtttttttttctcacttttttattactcacatagaaagaattgaacaattactatttttattatatttattatctagttgagttgaattgagtttcattgagtttgaaacttatgaactcattagttgttacctaacacaattctaattgactgcactaaaataaccaaattcaataatgactcgatccaacttataaaattataattgagataaattggattagataggttcccggattaggcataacccacttacactcttgaaaattagtttgattggtgcacttcaataaaaaaattctataaaattttattaaaaaatagaaaaagaaaaataaatttttctttaatttttttaaaaaattagaaaaaagataaactacaactacttgtattgcgctaagtttgttaaaggaataaaactatttctcaaagccttcactttgatgtatagagattttactgaatttacataattttgctatttactttctaaacttgttgattcaacattttaattctggatatttttgccgtcaaaactaggccagcaaatataggggtgagcataaatcagagaaaaccgagcaattcgacccaaaaataagtgtttcgggtgggtatatgcgggtatcgggttaaatagtgtgaaaatggtaatatgtgggttatttcgggcgggtgcgggttataaaaacaaaaaccaacgtaccttgcatcacccacaccttcgcgcaccaaggttcaagaatgcaccaaggctcaatggaaatagataccccaaataacccacccgctacgaaccgaacccgcctttatccgaacgttcatcgaacggtggtgggctgcgtttttcattggtccgttttgatgaggcccatatgttggtagcttgggccacggcttatttaaatgatgggccaacatacttttactcatcgaatcctcaaatcattatgatttatgactttgtctggcttctagatgaggaaatacaggaggattatagaagctctttgtgatattttggttttaggatgatagaaaatggaagcaaaacattttaaattatcaaaccggtaaattaaatgaaaattaatcatatcgaaatttaaaaattatacttaactaccaattttttttattatagctgctttgattcaattttatttattattgttaaagctgaactcaataaaaaataattcaaaccaatccggaccatattctttttacatatttaattgtttttatattcaaataaatatgtcacacacaaatattatgattatgtttgacaagatatttcagttaacttttaaatttttttattagttgaaaaacttatttgattgtttgataaataaattttttttaatagtttatcagtaatttttagtacttctttgaaatttaacattttttaaaatgctaacttctaattttttatattttttccacttttattcttgatatatttatttactttccttcttacgttttttaaataaatcatgatattattatttttctattattttataattttgagttacttcaactactagttttacttaacatttttaatttaataaattattttttcaatttttagcttttaattacctgccagctttgcataacgtatatctagtcaatgatctatggtgcactttttttatataaaagatttgtaaaacaaattaattgataatacatgttttatgtaaacaatataaaacattcttatttaatatttattatatacgtgtattactgttgttacattgcttgtgaattgtgaaggaaatagaactgggcgatgtaatttgacccggaccaaggttttaatgattgcacaaaaaaatgatagttttaatgatatataattatatatcaacattattatgtgagattttttaatagtgcttgtaatatatttttttatataatttttaatgaatttcaattaataaaaaaagatgttctcgaaagactaattattcctctggtgcgtgaatgcgtgaattctgttgaccaaagtttttttacaagaatcacatataaacgcttgtactgtgtcgttttatatattattaaatatttcttaaaatttcaacattcaattgttaataagttttatttttctcctttcacaagtgccttaatttctaggcaaaattgtatttttattagttcttttagttattttcaatttttgattttagctctcctttaaaattattgacgcattttgtcctcttattttattcaatcacacaatcttatggtcacttgtcatgttctgattggatgtcgattctatggatgatgaaatgtattattgttgttattggtcaatcagaacatgacacgtgacaatcatcgtccaatcaaaatgtgacacgcgactgtcaacattcatttataacggaaaacgtctaaatctacttaagggtcaagattatgtgattggataaaaaagaaagataaaagatctaaataactttaaagaaaaatcaaaatcaagattaaagacaattaaggaaactaaatttataattttaccatttataatagtgagtcctcgctcttagggtaaggccaaagttgtgtcccttgccgtcccttccaaacccacatgcgactatgccgcagcatcattcccaactgatgtaacactggacccactactatgcatccctcacgtgaattgtgaaatatggaaatccattcaagaaaagaaaagataaaaaaaaagagcaaaataattaaaggagattgcaaaggtttcggcttctgaggaattacttacatatacaattctagccctagctataactattttgctaggagcaactcatgtggcagcctggcaggcaagccaaaaaggtatgcctgggaatcagttgaaaaaggttaaacattggtcatgtcctgcttggtaattaacgtgttatacttgtcaaaaggtatacatagccagctaataaggtttttctctttgcattctatacttggatatataatgatgtagatgaggatttttagtcaatttagctatactttctactccaaaccattataacaattattcttgactttccagcttgtatacatttgctcgcaggtgtacgatatagacaatattagatctaagaaattggtaaataatgagtaacaattagtcgaataatttactatacttgtcagctatatcacccaccaaatcttctaaaattcaaccctattatttaggaatgattctgtagacgtacaaaaagaaatcttgatgttgtcagaatataattttctcatcaacaattgaaattactttaccctcacttgagtcacatacttatcacaacttaaatttgttatatagatatcaattattgttgctctcattttcaaatttgattaatctaaagtgagtaaaaataaagtaatatgtatcattgatgagaaaattaattgggttccttaagtgtatatgttgacaagagattgatatctgcttctaaaaaaaagattaatttctgatcgagtacatgaaacagattttattaggaatgtcaaaactcatttcagtaatgcttatgattcacaagaaattaatcttggactatcaagtgatattcttaattggtacaaacaaaaaagaactccttttaacacaaatcttcttactcaacacttaaattaagctgctagattaggttaaatccttttactcttggcagtttctatttcgaggcaggtatgataaaaaggggtcttgtgaacgggccattttcacaacaaaagaagcgtgtacaaccaccatgaacatatatatatatatatatatgtcctccattggaatggtttagctttgttcatgtgcgccatatactttattctgctttaaacataaactagccgacagaatcaagtgaacaagatgaaaattgtaccctgtattcttgtgtcttggctgtttcttcaacaatgacagctctatgccttctatgttcttcttttctcaatagtttggaagttccaacgtggatgttccattttatactcatgaatattgaagcatcaaataccctgccattttcttccttcaaacgaatgaagcagggcatgtgcaaaatctctcctactctagctgatttttagtatatatgtttggttgtgcgtcaggagagggaatacgtgtgtttatatgattttggttcaatgggatgcaaaatcaaacacacgttaaaactagatttaagtttattcaacgtcaaaaactagctaatcaaaaaaagattatattaaaagataaaataattaagattttattcatatttaattataagtctacaaaagatatatataaaatatagaagaataacaaattctaaatttatctactaaattatcttaataacttaaatttaaatctatttataatttaaatttgaaatataacaacttacaattaatcattctatcatatgaataatatagcgtattctaacgtattgttcacactttataaggagtattatgaccatattgctaactatgttacatttttaaagcaataatgttcgtgttatattgacatctaattttaggaatcattcctaatctaaaactatactctattttggatcctacgaatcttgcataagtacaaacactccaaacagtgattattctcccagaaagagaaaacacagctttgtgtttgtacatttattcttgatgtttctctttcacggccagttttttttctgtaggatagggaaggatcattcaattcacataccagtttgcaatacctaattgaacgcaaacacggaatttaataaaacaaccagtttgctatatatatattttcttcccaagtgtagacccaggaggcacgttacctaccagcacttaaattaaatgtgctaaacaaagctaccatttgattagtagttaacagctatggctaaattatcttgaaaagtatctcattaagtgcatacatagtcttaagtctccaactcgacaaataaggaccttagagaaaaatatctcaaaagcacgcgctatcgattgagatattaaagtagcacgcttatgtatataaatgattcattcgattaatattacgtttgttgtacctgttctagaatctgagtcaagttttgagaaaatctcgatcccttgttgccaacaatgagttagctcaaacggtaagatttgacagcgttaacaaaaaggccttgttggtgtgatcattcatttgatgtagcaactacccgaatttgtcactttggaattggaatttgtcatcgatcactattaagtattagtcaagctaaccctaatttgaaaggttgtcagtaagttagttgttagagagttagtaataaaagaaaatttatctaacaaaatgactcaagtactcaagacaaaaaaaaaagaaaaagggttaagatccttctactcctcacatttaaaagtacactatctcgcaaatcctaactccacatattgaactaacgtatgaaaacatgaaagtaaactaatcccaattctatggtaactattcctttgctcactaaaatataacccggattccttagctactaggtataaccaaattagctagcaagcattaggttcaaggttataaggatggacacaacagcatgctcctgtattcctaaaatgtatgcatcatgtgtctcaaattcttggttcctatacttaagattcaactttccaattgtcattttcttgtgtctgtaaaagaaaaaactttaattgtctttttaagtttagaatcattcaattgatttccatcataaacaaaacctgaagaataaagattaattttgatacatgaaagtcaagatacaattattaaagtgaatctaaaagttcaaaataagagtatcaatcactacggaaagactaaaccaaaattaaaacctttgcaaaagattgaagcatgagagaagattgaatattgcaatcgaagaagctcggccgcgtcgatttcctagagacttggagtggttctctattgaagcccaacaaaaaaatctacttctcacactaaaagtgaatacaaaagagagaaaaatattaaaaaagtatatggtgaaaagtcactcaaaacggtgttaaaacacttgttcatattatcataatttgaggtcgtcactcgacgctagacaattatcgttgagtaatgttataactaacttcatcgttagacgacatcttcgattgcggatggaggttgtcacaaaatttgttttgaaaagtagaagttttaattcttgaaaaatcacttgcatattgattacattctttgagagagacaaaaaattttaaatatgactaaatcttaaattaaagattactctctcataataggtaaaaaaattgaaatttataaaaatatctcatatctcaaaagaaaaattaaaaatcctaattaccataattataaaaataacaaacaaacaataaaaccattcaaagtgtccatagattatacatatttccaccttagcgtcagcagtgtaatccgttagccaatacatcacaagggtgatagtaaccagatcgatgctctttgactgcaaaaacaaagattgaaaacctctttcaccattgcatatagaacagattgggctgagagggacgtacgtattcctctcaattagcatatattttgtggcaataaatgttttaataatttaatccgctgttcagttggaaaagatagtatcagtctaagaagttgattcgcacaaaagtctattaaatcagtgccatacatatgaatcacttaaaagaatattgtgtaatttttaaagtaaaaaggaattgaagtcagtgtaatttaaatttcttctaaagatgaaaactgcttgtttgactttatatataattaaatcatagtgaactaggcattaatattagaaatataactttattattttaatatatattataaataatataaggtaacataaaagcataaatcaaattaagattttaatcaaacataaaataattatattttatattatacaaaaaaacaaaaataaaaaactaaataataataactcacactctttgtaacttaatttttatttgacttaaaaaagtaattttgattgaatttaaagaaaaaaaacattcaaatcagtcaccacccattaaatcggtcatatcaccatcaatttaacggattagatttcttttcatcaacacttggacaatcttaatataaaatgccacaaatttgttggcactcgtagtttccacacgagatatatatatatatatatatatatatatatatatatatatatatatatatatatatatatatatatatatatatatatatatatatatatatatatatatatatatatatagaataaaaaaagaggtaatatctcttattttaaataaattattttttatttgaaaattgtttatacaaggaaatcgaaagctaacacgattaggcttctcatcatgcaaccctttagttattctttatttattttttagcatttataatattaaatttaaattaaataaccatgtcttgtccacatacccaactacaaagaaatcagaatcagcttgggtggtgggggcgcaatgcatttgaaaaagataaaacaacgaccaagcatcactttagaacaaaagacttaattcacaaagttggtttgctttgtactcttgaatcttgatcataaaaaagaaagttgtttttcttatcttacaaaataaatgcttatataaaggattggattgcgacacaccatatgtaaattaactatacaaacgaagatataaagaatataaagagaggtttcatataaaatatccgaataggtgttgcgttgtacgtgaaagcacagaaaccagtggcgcaaagagaaaccgaatttttctatttttatattttgctattaaaaaggaaaatgagcatctatacagaatatcctatctaactataaagtttgatatagatataaatcttaaatggataaatgaatttagcagtatatgatatatatatatatatatatatatatatatatatatatatatatatatatatatataagattatttttctgttaagtctgactagattaaccagttaatcacattgaattataagttaaataaaatataattgaaatatatgcgcatcttttaaaagttgttaattatactattaccttcttagacattatcaatatttttgaaaaaaaaaaacgagaaatctattttttcataattatcactgacaattaaaacttttcatactattatttcaataataaagaaaagtataattagtataattaatttaaaacctttaataattgtccacttatacagtattatatttaatttaataaattaaggagtgcttctgttttacaaaacaaaaaactgaactgcttccactgcaattgctcattagtatacttctaaactaattgtaagcaatagctggatataataggatttagaatactaaaagaactatatataatgaatttttcatattcttggaaatatttgtctaaaagtgtagtctgattaattggttgaaacgtacatatatgtatacatgttcgaaacaaagatatttcccttttatttttttccctcttaaacttgatcccttagcttttatgaatagagcacatagttggagtggtaagagtgaagaaaaaatattgatcttctaataagagtaactattatactcttcatcaatatataggccttaattagcttttggtcaaatcaaagggacacctgacacattcaaatcgaatacatctttcggtcatatatttatatatgtcaacaacatgtctcaaccttcaatatgtacaagcaacaagcatcacttggtcattagtattaccactaaatttgcttaagagtgattactcaattagaggtatctaagcatgattagaaaaagtattattcaacaagtaatcatgatgctacaaatccatacactccaagtccaacaaagttagtataaaaaaagacaaatccctttaagataaaggaattgattcattctcacctactcatatatatatatatatcactcatatatatcattcatagttctgagtcaaatcctcacataagcatcacaatgtattttgtagatatttccctttcatcttgttgattatacacaccccaagacttcggcgaggaacactaagtagatgatccttcgacatagtaagagattttttggcagaatgacgaatactcaatccatttataacgggaacaccaagcatatttaacaagtgacttgaaccaaacaaacatacatataaatacatactgggtgattctctaactcatggccattgatacataattaaacggggttctaagaaaaacatcttattattttttcgaccatgtttgcataaaactaaatccatcagtcaattaaaggacaaactaaacctagaaaattccaacaataatttcttagatgtgacattaaaattatggcatcacaatttatttttaccattcttgtgattatgatgttaattagtggtctgagaaattagtcagattcctatctgattgcacgaaatgtttggaagtttgattctatttggcttccatatatacagcgttatactagtctttaattattttgctcagtaccaaaggaacttcaatttgttcatcgtttgaagattaggtcataattctcgataacgtttgaagcctgagcattcggaacgcaatatttcctaataaagacaaggaactcgatcatgatcgttaagagaaattgtaggctaatttacccaacatgaaacgctgttctggctacaataaagccacacaattttatgatcaaaatcgtttttcatgatttattttacatggaatcaattattaattcaaattaatggcagcagtttttatttttgaaaaacgattttggttaagcattatatatattgctttactcctctccatcggtttcaatattttcgttgaagttacgtatgccacttgatgctttcttcatataaaaagcttgcattcgatcaaaagccaaattaaaatgcaaacgaatcgttacagtaactagctagggcaaaccgtaggccaagataacaaacttgagtttttttgttttggggtggggggtaagcaactatagatttatttgactaaatgcatctgaatccaatgtaattagttgtagggtttatgcaatgggttagttctgtatatagtaagttatattttgataaacttttcttaataaatacgcatagtagtaaaaagagaagaaggtgaaattaatttttttttcacattagttaattatgtacttcaagtagctttaaataaattctttcatttaacttctctaaatactagttttaacttatgtataaaatgagatttttttaaaaggcaaatcaatttactccatcagtcttaattatattttcaaaaattgattttttttctttttataagattattttctaatttttagatatattaattatgttttttcttatatatccttatttaattattttctctcaaaatattaatgaaaaacaagttagtgggtaaaaaaaataaaaaatatattttttaaatgataatataaataattaataaatttaatatgataattatttttcttaaaaaatataaattaattaaaagaatcttaaattagtaacagagtattaaacttgataactgaagtacccaaagaacaacatgtacaatataattcccttagttactaaatattaattacagtaactatgtaataaataaccagtaaccaagagattgacccaccaacggtgtagtctcctaggaatcaacttgtgttaaatactatgtccgcctttcacgatttgtcatgtgccaccctccttatcgtcatccttctcaacaggacaacaattctttcaaatatcttttttttcttcattgagtaagcctctccaaaaataacttccaagagaaagggagatgatatctatctatctctctctctctctatatatatataatagtgcatatatttatcagtttatttttcttcttataacttttttcagtcattttcttttaaaaaattaacttatgggagtaaaaaaaaaatttaatattcaagtaaaaatatttaatatattcaaaaaattaaataggtgaatcaaaagggagggtttaaaaagtcttcataaatatatatatatatatatatataaagactttttcatcaacaatagaataaaatatattgcattatattaatattatatatatttgaatttgattttataaatatattttaaaaatatttttaatcaataataagaataaaataacaaattttttaatatatttaacaacactaatcattcaaatttgcttatgtgcttaaaaatttaagcgatgattttgtaccaacaaaatctaatggttttttttttaatatatttaacaacatctaatggttttttttttctttttcttatagttaccgacaaattttattttttaccgatggaaaatattaccgacggccaagccgtcactaaggctaatatttccgagagagataagtccttcagtaaaattttgtcacaaaatacaatttcaaaattctattgaggatgaaaaaaattaaaattattttatttcaaaatacagtgtgtgtttgaatggagaaatttaaaattttaagaaatttaaaattctaagaatttcaaatacttcaattgaaattcttttatttttaaaattgtgtttggataaaaaaaaattaaaattatgaagatgaaaaaaatgaatgaaaaaaaaaagatataattggtgtgctagttatacgtgttgttcctctattctcacacccgatagatatggtaggaggtaagacggtaagacggtgtttcttaaagaagacgagaagaagagaatttcaatttctcgcattttaagaagaaattgaaattccaaatttttagtttttaaaattatgttttaaaattccaaaattttaaattcttcataaaaagcatccaaacaatgaattctaaattacagaaattcaaattctctgataaattactttaatcagttaaaattctctatgcactctaaaattgaaaaagtttataattccgaaatgtcaaaatggattggaaatttccgtccaaaatgctaaaatttccaacagaaatatttccatcagcaattctaacctttccgatagatttagatccgtcggtattttctgccggaaaacaatgattttcttgtagtgttaatagcaatagtgaaaatcattcaattataaaagaataaagataacaatcaaacaaaaatatttctaaatgccaagaatatatgcttttaaatactcatgagaatttaaaatgcatttatttccttgtgtagatgattttttctataaacacttatataagagaaaaaaaaattcttatataaactaaaaagtaatttatgtataaattaaaatcaacttttaagaaaatataaatgattttttagcttccttataatgttgattttaatttatgcataatttattttaatttataagataaacttatgtttttattattttttacaaataaatatggaaaatttaaacttaaataatgatgtgacaataactaaaatacacgtaataatagtagcttaaattttaatttgctggctcaatatttaacataagtcatttaataataaggatcaaaacattttccttttataaaaatatcatcttaagtcaaacaatatatatatacatagaacagtataaaaacttattttattaacaaaggtgttcatgtatctggttgagctatatttggttaaatttattattcaattctatcaaaatttaacgttttaggatggttgaatttgtataattttgtttatatattaagtcgaattcaacttgatcataaatgaagtagattggatcggattaatcaaatattaacatttttttgtgaaaattatttttttagaataataattttttttacataaagtcttctaagtatataattgaattaaattgtgataatattttattaattgaattaataattttaatactaatacgatatttttattttagatagaaataaaatattatattaacataaaaaaacataattaaaaataagacatagataaaaataataacttaaaagaaattatgagtgatttaatttaatggtttaataaattatgtaagttaaaatcaatatattttatatttaataaataatttatatataataataaatttaattatatgatatggattgaatcggattaaaaaaaaaactcattactagtttatgatgggtcttaatggttgaatcaaatttaattcaaaaactgaaaacaatctaattctaatctaatcaagtcggatttaattaaagatggtttcagattcgtgaacatttctgattgctaaactaaaaaaactgtacaacaactaaaatcaaatttcaaaatatttacacaaataataaatatatttaggatttttttttgtccatttaaagtgtatataatgcggactacacgagaagtagcgtggtttagcctatatttatctcctaataccaaaagaatatatatctagtgtcacagactgaatccttgtccttgctaaaatttatactttattctaccattttcttctcacaacacgcacagggctagctttttttttaaaaaaaaaaaaaatatatatatatatatatatattaaatggaatatgaaaaaaaattgaataatgacgtgaaaagaacgggtgaggaaggaaattgaagggtgtgggtgggagtagtgagatccttccctaaattccgagcgccactctgatagggactgatcggacaggctgcttttgtcttttttcccccacaccactgcactctcttcctccttctcatctaacccctatctccttattcttcctcttccaaatctgtccctatcctttcaatttttttaaaaaaaccttttttttttgtgtaagaaaaataaaataaaactgttgtctgttttatcaataatgatttatgaacattgcactgccacctggtgttgattttgccctcccattttcagtcactgcactttttcagagattcaattaacctaccatacaattttgtaaatgtttgttatcctttgggctttggggtctaaatttttttagatttttatttctaatctttaatttaaattttatgatcaaaacctcttaaatttttgaacaatttattgtcaaataataatacaataacaatattagtggcttaataacttatcacgtaatcaagttagttaacatgacactcacataatttttttatagtttgtgtttttaagttttcattaattaatttgatgttatcaattgttctaaataaatgaaaaattaaaatatagtttataaaaaaattacacgcaattattctgttgcaagttattggggtgcgaatatcattgttacttaatgttgttatttaacagtaaaaagatatttaagaacttttgacggttcaaaataaagatagcaaacctattttatatattcactttatttgttaagcataagggatttttttaacagggaagggggagagataaatatacatgagctagatttaatatgaaaaagcatgaggaactaatacaatataatgatgatacaagatcaagtcatctcttccagcaaaaagaaaagaaaagaaaatccagcaagaaaagatcaagtcatctcagacacgtgtttctgcgtgtatcatactatctgctttcaaattaaacaaacgacaatgaagtgtgcgtttggattcttgtcatgattcaccaaaaaaaaaggttaaagaattgaggactcagacaaatttaaaaaacataaagtttcatctatgtaaaatatactaagtttaacttggaggtaaaacacagacaatatataatatcgatcataatttacactatttgatgatgggagataaggagtgatgtcaataataggatctaagtctgatagacgaaatgcatgtggatgaatatttttttttatgtgatatgtgataaaaacaattacgactcaaagaaaaatgttaccgtaatattatacctacaagacttgtaattaaggcattaggttaagtttttggcattaaattaaagagccaaaaattaagaaagtaaatttaatattcaaactttgaacaaccagtgttgctttagtggcttggcaacaattaaccagcggtaaatttttttctttagtggttttttttttctctagtgtaatgttggtgctgctataatgatcagaaaactgggtatggaatgtgtaattcagagatgataatggctattgctatgctgcaagctatgtaatggtgttttgagttggatctccaaaacgttattttttgagactggcagtaaattatttggtggtggagagaataagtaaaccacaagttgtgatatgtctgagtttgcagctgtgacatgtcattgaggattgtaagaagttagtgcattttagtccaaactttaaaatttagtttgttagcagataagttaacgtgattcttcatactctacaacgacatctacattttaatcttatgctagccctcatgtatttcattacgtacctagttgtattgaaagtttaagagtaaaaattgcatatatatataaaagagaattcaatttaatcaaaacggttaatcaacttattaagtattttaaccaaacctatcattgatgtctaaagatttaatctcaattctttattcaattttgtttgatattgaaattaatcaataaagcataattcaatttccagagagttcctactaaattaggcatccaagatataactaatttctaaacttattcttgttcaaaccattaattaacaatactagaaaaccgtgtttcaacgatagttattgagtgcttttaacgatggttggcaaaccatctttaaagttgttgtcgtggaaagtaaacattttcatgaaggtttttgaattgtcttggtcagttcgtattccacaattttaatccaaaaattgtcttagaatcataatattttaagacgattttattccaaaatcatcttagaattgtcttagaccgatgttgatttttttttaaatgtttgttttgtttttatatcaaatcaaatcttctatttcagtcatgtagacccaaacaaatcgattgttataacatattacaaaattaattttggtaatgaatttcaacatacatgagttacattgtcaatagtgtacacatacatgaagcatatatgataaaccatattacaataacatgaggattctggtttacacaaatgaataatagataaaagtaattactagatcaatacatacatataagtaataaacaactcatgcacactatgagggttatgacattcataatgggcaaatgaaaaattagctgtccaatctcattagctagatcagttagccatccaaatggtagcatgtctaaatcaggtcaagaatttccctttaaaccttttcctcctatagttgtagaaaaatctctggttcaaaattaaatgaactaaagttatgtaatatgatgataacataatgtatatagagaagtaacatgattgcaacatattgcaagcctggtaaaaaaaaatcttaaacaaaaatatagatagcttaatcactttgttacatcaaaatgagccttgacgtcctcccataaatcttagtcatctcctgttattatatacgtgttgactagtccactaacatccttgtccatggctggtgtcacattggttccaggagaccgagaatacacaataaagtgattaagctcactaagaacctgtcatgacatgccatatatgttgatagatttgttgtcgcccttgcgctgaaacatgattgttaggggtggaaataggttaggctttaaaaggcctgagcctagcctacgatgaatttttgaggcttggacctgacctatagcctatcaaagacttttattttgactcggcctgacctttttaaaagtctaatctagcctaaaatacccacccgtaacctagcgggcggataaagtacattaaatagtccgttttaggaattggcgacttacccattcaatgactttgacaccgaacgttcccaaattggaatgtgtattatcgatataggggatctttcaattgagaagatccatcgacctgagacgaagagaaagaaaggtctgtctatttattttttgtagtcatttagttaaaccaatgattcgttattgaaacagatagcaacaaccatctcatctgagaaaagccatctttttctcaacaacaatgtctttgtcatttgatcctatcctttttaaaagtcttcttcacactaaatctttaatattgatttgctctggagtatgaacgtagtaggaaagttaaaggaaaatgaaacgttaaccggaataggaaaaccaataaaaataatgagaaatataaagggacacatgactcacacctaaattgtaattaaagtcttacttaattatagtaatggaagtcatgaagcagtaatgtgtaatcaaagtctgctagtttaaaaaaaaaaattgtacccaaaaaataatataagtatatattgttactcaaaaaataatataagtatatattggtatccaaaaaataatataagtatatatatattaacaagcctaagtctggtctatttaatttaataggcttctaaaaaaggtctgagtctaaccttttaattaaatagaccagttcaggtcaggctttatgtaggtcaggtcataaattcctgtagaccggcctaatctattctcatttggtgatgatttagatttaaatgaaataataaactcaactaaaatactaattaacaccaagcatccaaaaaccaagaacaaagttatgataaatgtctcaaaatcgatcaatatatctaattattatttacctcagcaaactactaactaaaggtagaagcgtagcgacaaccatatatactattgtcagtttgtcacaattagcaacaatgttgtcataagctaataaagattgaggatgggagctagaataatgggaaaaaagaggtcatattgtttttatagtaggaaagccaagattctaaaattattattttttaaatttcttttttattctatatatttaaaaaacacaattattctataaaatatttttagaattaaaaatatcatgaattagttcaattccgctagaatggaaaaaataaatcaatcaaaatgaaggttaaacgaatttaaatttgtctataatacaactattttcttattaaaaagttaaaaagtaaaggatataaatagagtaattttttattctattttaaactctaataaagtaatcaactgaaatcatgttattccaacttaaataataatttgagttagagtttgaattcttttttttatacctgagaatcaaagataatatatatatatatatatatatatatatatatatatatatatatatatatatatataaaataattcacatattatatttaatcaattaaattagactcatttaatacttgggtttgaattctaattatgttaaatatttatagcatttattacttataatggactccaataaagtcattttttcttttacttcctatttttttaaaaatatagtatttttatactctttaataagcgttcctttttctttctcaagattagaattttcattttccctaaagagtaaagagacggtcagacagttcccttcctattatagctacaacacggcggtgagttcttatttttatcttttaaaaatcatttattgaagataagcaaatggatccatcttccggtatttcaggatatccataattctagtgatggcatgttttaattgcttgcatagcaatattaattgagtccatattttttattttttgtattttttctatttgtgataaaagtatgaacaaagtcagatatttatttttagatatttctagcactgttctaaaaatatatatttcattttaaaagttttcttaatttaaaaaataatatacatgacgtttaagatcacttaaattcgtttgagttgagtaagaatttaaataaaaaatttaaatttaatttaatcacattttcagtaggataaaaaagtgttatatttatatcttaggaaattgcactagatttaaactacatttgacaaaagcatttgaaaaattagttgaaagttaaaaaacacactacttacaagttaaaagcttacaacctaaatctattgaattaagtttttggagatatataaaaaaaataaacctattgaattaagctttttgagatataaactatttagtaaaattatctatccaactattgaaatagttgataaatgtaaaatgaattaaatggacatgtttaaatgtttttctatattattttttattttattttattttattacaaagtatacttttgggtattttaattttatttttttaattagttttaaaatatttaattttttaaattttaaatcaattattttaattatattttattcaatatatcttaaaatactctaaatcaaatttaaataaaaaaacatgcattgagtagatgtcatattttcattatgttgatttgtgtaatagttaaaaaaatattgaaatataatgttaaaataagagaataaataatttaaaataaaattattaaaaaataattaatagaaaaatgaaatgaaataaatctattacctgtcattgtcaatatcttgaagtataataataataaaataaatatctaaataatgtaatgattaaaataaatagtgtgtatgaaaaaaatatctaaaactaatagtaaaaataaaataatgcattgattttaacaaaaggtagaagagaaaaaagaaaattatcttatataaaaataaaaggtaaaaagaaaatttaataaatatttaaggataaaaattaatacaatttttttgaaaggagtaaaaatgaatacaatataacggctagcatttaaaaaaaaactactttagaataagaataacatctaaaaaaattcaacgcagcttgtattttattttattttttaattccttgtattactatataattttattctatctaactattgtactataccaaaattctgactactttttttttattctatctatagtttttattttattttttagttgttagtaaatttaaaatattttttttgaatctgtaagtttaattttagccgcagactagcaaaacgattttggataaaaactcattgaaattcttataaaatgatattaattgtagaattttaaattttcatataaaaactagttaaataaaaaatgtgatttctgatcacgattttttaaaagaactataatttatcacgattgatcattaattaattgagactaaattataataatactaaatttgtattaaaaatgcacaattattataatatatgataatcataattaaaagtcaatatatttgaattgtttttttttaatttttgttaatgataaatgtagtaataatagctctgatgtatgaaataattctttattcattgagtacatgcgatatggcttgagtcattgcttattattatctaaaaaagttcacaagtgtacttaaagtaggggcgggaataacaaattgtcaatttaagtggtattagatttgatttttttaagtaagattttgaatttgaattttatggataaaaaaatagattaaaaaaaaagaattttattaaaaataattaattaaattttttaacggaagttaatcatttaacaaagttgatgaatattctttattaataatatgcttaaaaaaagtatgggtggaggtaagggaaaatgaaaaaaaaagtaaaaaaaacttccatttttagtagactttctgttttaatttcagaatttttagaatgaaaaaacaaatgcctaatcgtcatgaaacctttattgattttgttggccttcatgagttaataaagacaagtgaaaaatatatataacaaagtaaaatatttacttttctcctgggtgtttatgggtagggggtagggattaccggtgaatccaaattgactcaaaggattcaaaagtttctattgagttatttgagttatttatgtatttgggtcaaaactgaatcgaatcgattaaaatcgttctatgtacgagttgtgtcatgggcttaaatctatagatctgatcaatacggaactgaaccgatcaaatttttttagagttgtttggtttgactttaggctaattgagattctaagtattgaaaccgtaagtgttgaaactactaggattaaaacttcttaaggtattactttcaaatacattgttatttgtttcatcttttttttcatatttttttgtcatgtttataatattaatggatcatattttgttcttttgtttcaataaatctggttgccgtaaaacttattgttagaaattagtttgtagaaaataattgtgattcatattgttatagtaaatctcgttgaaaaatattttatattaatttgtattagtctattttaaaatattatattgatgatattaaatgaatcaatttcactactttcagacatataataatattgtgttaattatattggatatttgaatgaatcatggtataaaataatagttttaaaaaaattaaatttaaatggataacttgttggttcaaaccgaaccaaaccgttcatgaacaagtttttggattgggttgatttcaaaaaaaaaaattataaaaacctaactaaaccaaaccgatcaaatttaattggattaaatcttaaatataaccctgatcagcccaaaaagatccctacttttcttaatatttgcaagattcaacggacttgatgaaactcgtcaattgatttcgggaatacatagaaatgaagtttatgatataaatttctctaaaaaatgtttatgatataaattatagtttgttatatcttttgagcattgatacataattagtaaatcttgatcaaaataagttaaaaaattaaaatactttatagtagttgctaattaaattaaataatacagagtacagacgacccatttttctaacaataaacgtaatgctgtgttattttgatctgacaaaaggattctacctatagaatttcattttaattaattaatcataattttaaaaaaatatatgatgtctttaaaactaaagtttccgtttaggatattaaaatgtaaaatttgtttatctttttttgatcaagatggcaagcaaaagggataaaacaaactacttgacccattgtgggcaacctaatgtgggttcgaggctaaaacaaattttgtgaaaaaagttagatttaatttaaatttcaacttctaaaataaaattcaaacccggttaaacaaatattttaggattttttttataggtttttatcacatcgaacaatgaacaagttgaaccaaaaaggctcaggtacatttaattcatattcaaaatttaaaactcaaaatctacatttcattaaacatattcaagctagttcaattagtttgaccaatgttatttcaacttaatactaaaagggtgtctggaaacacgtcttggatccacatttaggcagcaaaattatgttaaaatgataaaataacatagaagttacacccatttaattatgcatggacataaggtgaatttaattcaaacttgtattaattctatatctataattaattttttaactcttttttatatgaaatcaaacataaaatttttaatctaaaattaattctaaatttaaaatcaattttttaatgtgaaaccatgcaatttcattaatcctaacttacattagcctatttcttctccgaaagaaggtagattaatcttacaaaaaaaattatagtacttgaatactttttctctcgaaatattttggaaataatatttcaatcttcaaaatttattacacccatttaattttaaaataaaaaatctgtcactagaacagtccaaaagtttgtgtttattataaccaatttaatattacatatccataaataaaagaaaataaaaaatcaatgcagtacgactaatcttttcaagtattaaattgatgttttgaaaatattcaaaagatcaaattaaaaaagttaaataaaataaataaaaagaaagataagaaagtgttggatataggaaaggggcaatatagtaactggaacacctttgtccaggctttccccaatctcacaaccagaccaaggctcccaatataacccatcaaagttccccaccacagagaagaatctctctctttatttctttcactctctcagaaccaaaattttccaaactcctcaactctcatcagatatcaaccatctctctctctccaaactcaaatacctttctgttctgctcttcaatttattcatctctgacaccctcttaattctgcttccagttcctctgagtgatgggtatgatctctcctcactcccacaattcccacattatagtaatcctcatcacctgcttctttcgtcataaattctagatcaaactccactccctgatcctcccttttacttcttatgtagcatgtatgaactcaaatcatcaaatgaatatgaccctttaatctaagaagaagaaaaaaacacacacatacacacacacactttaaagtccaaagtctaaaccaacccaccaaaagtcttgttcccatggcgagtggcaagctttatgcgggttcaaacatgtcacttctcctccaaaacgaaaggctcccttgctcctctgaagtccttgagtctctttgggctcagacctctaaccctgcttccttccaaggtgatgattcatctctcttccttctcaattcccttcactctcttcatacttttttttactacttcccttgctcatgaattttcactacctcaacttttatgtcacatgtatacatacaaacatacataccaaggtattaaaaaacggtcttttaagtcacaacatcaagcttcttgtggtttctgtgaccattctgaaaggatcgcgaccgcaatttaaaaatctgacacatatatcaacaaacaaacaaactaattagcttttttttgttgttgttgttgtatgtgaaacttgaaagttggtttctttcagttcaggactgttgtttgttcacttaagatatttgaaagttgttttttttcttccttggttatgattaaattttaacgtggtggtttttgctgttgtttggtggggttggttttcaggttcaaaacccgtggttgattttgagaatgtaagtgggagcaggatgacggataggcctttctttcaagcgttggagaaggaagagaactgtgatgaggattacgaggggtgtttccaccaaccggggaagaaaaggaggctcacaagcgaacaagttcagttccttgaaaggaactttgaggtagagaacaagcttgaacccgaaaggaaagtccaacttgcaaaagagcttggcttgcagccaaggcaagttgctatatggttccaaaaccgaagggcaaggttcaagaccaagcagctagaaaaagactatggcgtgttgaaagctagttatgacagactcaaaagtgactatgaaagtcttgttcaagagaatgacaagttaaaagcagaggtaaaagaaattaagaagaaaaaagagagagacacacacaacacatacttacactcaattttgcttttgtgctttatgctactagtactacttgctttaataaagtgcaatctttattatttatcccactaatgggttaatgattggattggcacaaaatttttgttactgacaggtgaattctctggagagcaaattgattcttagagataaagagaaggaggagaattcggatgacaagtcatctcctgatgatgctgtcaattcttcttcaccccacaacaacaaggagcctatggatttattaattatttcaaaaaatgcaacaacaacaacaacatctgaaaatgggaccaaagtgttgtcaccactcccactccctattatggtaacatgctgcaagcaagaagatgccaactcagccaaaagtgatgtccttgattcggatagcccacattgcacttcattcgtggagcctgctgattcctctcatgcctttgaaccagaagaccactcagaagacttctcccaagatgaagaggataaccttagtgaaaaccttttgatgaccttcccttcttcttgttgcttacctaaggttgaagaacactgctatgacggccctcctgaaaactcttgtaattttggcttccaggttgaggatcaaaccttctgtttctggccctattgaaccaaaccaaccaaccaaccgctagcaatgttttaaaaaactttgcagttgtaaccatgtactagaaagcaataaaaatggtattgttacttctactaaggaataaaaatcaaaaggccaatgcatcatgctctcaagtctcaacaagaaacaatattaattaaaagcctaaaaaaacacttctttgaatcctaaaatgtcatgtgtgtcacactggtggtgttattagttagcagcgaaagtgtacgacaatgttgctactagctaaaattcaaaaacatggttcaggtgtgcgcgtaggtatcccaaaatttctggtggggtacaacaaccaatcgttgtttttactttcggatgtggaaagtggaaaccctgttttcactttttctctgcactcatctggatcacaccgtcgttttactcatgtattaggaagaccctttatcatattcaccagttctcactgctcagcataaagttacgttttcatatgcgtcccagtaatcactagagtggcatagcgacgagagtttgagtaatttacagaaggtattaaattcaaatctcgctactgatgttgtatcatttatcatgattcaccagtcctcactatttagcctaaagttttagttctataggattttagattcaaatctcattaccatcgctgctattgtacactaaaagtattgtgtctataagtcaatgatgattatgtaagaaatatttggcatgggtttaatgaaattgaaaaattaaataaaaggaatgaattattaataattaatatgtaagacaacaacatgtatgcaacaagacaaatataatacatgatagctacagtcacctttagcagcactaatacaagttcaaagtaatagtttccttatttcctagcattaaggtaaattagtgagacttgggtggaagcaagttttttattattatattttagatctttaacgggatagaatagaagaggttacttacaagtcacatcctattggtgcaaattcacattcaaattgttgcttaaactacaacttggatgaacagaagtgacatacatacattgaaggccgcaaaagttgctagctacttgtcccataagaaagttgaatttagtccccctttgacatcgccacgaatgaaattgaacttctccaagcaactgtaagctcgtgagaccaaatgtaacgtttgttttttttttttttatcagtaaatattaataatttttttatagaaatatcaattgaaaaatttgaaccggtaacttctcttcacttccttctctctttattatttttcaaccaatagatcaattttatattttctcagaacaaatctaacgttgaaaccaaagtaaaaaaaaaaaaaaagcatggaaattaaaagatggagaaaactaaaccctgctacagaagtcaaggtttctggtgtggctcgcttgaacaaattgcattggcgaggactttttaccccctgctagctcattgaggatgttgacagcttcctctcaaaaactaagaattaaaatatttgaaactcattcttgcaattaatcccatgcccttggtttcttcatgaagaatttgtccttcgcagaatcttgtttagctgttgaaatttggttcgcccatgaaaaaattcatgtaaagtgtctcaccctttaaaatattatatgcattaatattttactcaatgtgtgttgcatcacccattgacaagttataaatggaggcacctttcaggggatggccccttgtgcgtcttgacattattcacgtgaaacaaaagtttttagcctgaaggaagacacacactcaagtaagtgcaattaattaaataatcattaattaaattttctatgcttggaacatagtggtgaaaggggggggtttcagctatatgagaaaaaaacattaatgaatgccatataaactatgtgtcaattgatatttttctttgttgtgttatgaagagttagagtaccctagaagttaaaatagtggagtcaaaaatgtcatgctctaggggtcttttttttttttcaaatgtcattgcttttgtaggcttatacagctaaggtcaaaagtttttttgtggtcctaaaaagaggaacactgctgtatttggcatttgatttggtgaaagtgatgttaagtgaaactctttggcgtctttttccttttccttcttctcttgcagcttgggatctaagttgaagctcaaggttcattaattatccttgtcctcactatagtgagtaccatatataaacggatcaatgtcataagggcattgtctcataccagttgtacttaagaatatctctggactgtggcttaggatcaacaaagtgttgatggatatgaattttgttataaatgaattcaaaagcctgctaggacatctaatgttgggaggtatcacaaagctcactcttctacaattttaatttggtggggaaaaataagttggacttttggctctctgaaaattggagtttggtaaagacacaaaccgttacttttcctaacaaaaaaaaacattactttttaaatagaagtgacaaaatcgattaatttggcttatcaattcgattagaccggctaaaatattacgcttgaattttatattttaagcttaaatcgaatttgggctttttttattatatgaatgattgttttattagttccgagtaaatttatagcgaatttgtatcagcgtcatgtgagtataaatttgaattcttgttaaataagattttatagcttccatgttaaattggtatacttgacgagtcttggatgtgattggaaaacgtaaatcttagcatgctattttttttccggatttattagcatgctattaatttatgactaaattattattttaatactttatgttttagtattttttatttttttcttaaagttttaaaagttttatttttattttttatatttttgaatcattccattttagttattttaagcaaaacagtcaatgaacttgccacctcatcaaaataaagtcattgtatttttaaattagttttattttggttcattaattttttttaataatttgaacttattcttttatgttttcaaatgatttcattttgatagtttaaattttaaaaaagttttcatattaatgcgataaatttcatatgtacgtaccctcattcttctacttttgttggtagtagatgcccttgtaccaaaactgtcaaatactacaagtttaaccacttactatgaagaatttgcagtcccataagactacaaattaaagagttctgtaaaattggttaaatttgattttagtcctccaaatattaaatcatattagtttaagccttttaaaaaaaaattcattgtacttaaattttcaaaattatccttttaatttcattatatttaacaaaaagtattaacagaattaaataaaggacttaaaaggaaaatttttaaaaattcagagactaaatgcaataaaattatttttggttgattaaaattaatgagtcaatatttagaagaccaaaatcatatttaacttaaaaaagatattactatttaatttagtttattgcataaatactttgataaattaattcctattcgctgaattttgtctaataaggtttgttttagtttatttttcagcgaaatgataattttatttttcagaaaaaaaaaagtttaaaaatgactcggtgctttctcaagggctcacttcacagccagtttaattttctcttcatatccaccacaactcaaaatgtgtgttcagtacatttagaaagttattttaaaagccaaggtgaatagaacacggttattttaaacttcttacttgtttctgtcgattttttcacccccaataatgaaaaaacaaatatttattcaaataatacgactcaaaaaaaatttatcccactaaaacataatactattcatgtaaaagaaaccaattccctaataaccaatttctaaactaacgtttcgaggactgggaaatcgatttccaaattaggtttttatttttattttttaaaattcagttcataatcagaattgagttttttttttttggttatttcatttagttttttctttttttaatttttttctattttattcttacagttttttttaaaaattaatttttttaaaatttttattttactaatttgtatatattaatttataaaaaatagaatttatctaaaatagaatctaagaaaaatatatatttaaatattcaatataaatataatttagttaaatatttataaaaagtgcatatatttaagtgatctaattcttttactcaaacaaattaaataaataaaatatgttcagttttaatatagaatcaacataacaatgaaattaacatttttaattcataaatcttgtacttttttttcttaatgaataatgttgctttaacttttatttttatttttattgattttttatgcctaaatatatatgtgatattaaaattaaatgaacctaaaagtaataaaaagataaaaataaaataaataaaagagaactaattaaatttcatatataatttacactttttttactcatgaataattactatgtagtaaaataaaaagtgatttagtgaaaataattagttatttagtggaaataaaaaagtggtttgaattatccaatgtaataaaatatcaatgtagtatttaaaaaaatataaaaaatatacaaaatttcatttaacaacttatgatttttttttccatactggcatatagatagttaaaaagaataaaaaacaattcaaaaaaacaaaaagaaataaaagaaacaacaaaaaaaactcaattttttaaaaaaaaaaacctagcttagaaatcggttcctaggaatcgatttcttaacatgaataatatattgtatcattgagataaatattttttaatttatattatttagataagtattttttttattatttgggtgaaaaattctctttctatctacttgacaatcagtgatgaaattaagaatttaaacccaaggaaaaataaaaggttattttaaaagtcatggtaaccgaatagaagtagcgacggtgatagcaccactaaaaatctccacatttatatatatatatgaactttttaatataaaatctctataaagtttatcgtaatttcataggttttaaaatttttctctaataatttattctcatatctcaattttgtatatttgaagattataatagagatagaaacgagttaggcctataaataaggtcttaacttgaggactagatttggaaaagtctttcctaaatgtttttttttaataaataaaaaaaaagcttaagagagggaagcaaaaacaagagaaagcatacatgatcccaattaagttgatatcaccaatacaatgcctatcaaatgaattccaaaaaattcattaaaccaaaagatagcatgtgcaaaaccatgggggaccatgaaccaaacccatgaaatatcaaactatttgagcctatagttcggaaaaccaaccctaatttttaaagaactcattagaaacaaaatgtgtgagagatcagtcccaccacagatcgtataagaaaaaaaaaagtaaaagaatgataaaaataagtagaaaatgatgatggagtttaaatatggtcaagttgctttgtaaaatataaattcaatactttaactaatgaaggtcaacatattgtttggttcaggtcaaatatggtgaaagaaaaaaaatgaaactaacttaattgatttggtttagataatcgaattggtctggtcaaattaaactaataaacacattgttaatattattattattattatgttaaacttaaactttgtaaataatttggcagactttataaaagttaacttgacgtttttaataaacaaatttagtttaccatatcttagacgaatctagtctgcaccaagatcatctattgcatctgcctctgcagcaacgttttttttttttacaacaaatcacaatcaataatcacattctttctttttttagctactgtactattactgtgttacaataaccaaatgaggcttcagatttttgctacaaagaaaatactcctgcagaagtaacagaagatgttatccactctaactccaagtaatctaaccttttttcatctctattggagcaaaaatacactgtgttttggagggtttgcatctttcatagatcttaaaagttaaaagtatgcttcatatgtataagaccccctgcataattttttgatgattaaaacctatacaagtcatgattaaaactttgtttcaaaataactttattatatataagacccccaaatgattttttccttgatacctgtgttgatccatttttcctctacttcatttgatacttttatctttccctgtctgttttgctttgataggttgggttgcctacttgcctattgcctatgaaaagtgataaatttgttgcatttgtatttagaaagaaaccaagtgtttattcattgtagggaacttcacatcttactatttacaaggacatgagtgatatttggtccaatcgtggactaagtggcgcagacaacatgaatagataatcatttgtcaaaatcatttcgtaaagagaatcatagattgttgaagttcaacaatacaaagaagataatcaaattgccttagaaaatggcaagcttgtgttatggtgcacctttacaaaaggggtgcatcaacttactcctcgttacggattttgaattaatcgtaccactaagattgatatgaaagttttcacttgttattgagtgcgtcaaacacaccccaaagagttggtcaatgagaatggttacagaagaggattgatgaatcacgtttgcatattataatttatttatcattttaaaaattagaataacattttttaattatattctcatttagatatatttttattaagggaaataataaaaacacactttctaacatactctcttttgaacacattgtttattattaactaaatgttattaaagaaaaacaaaattgtgtggatattacttgttatttaatgaacctccactcataattttttaggttttagttaagaaaaaaatattatgcaaatgagtttatatatatatatatatatatatatatatatatatatatatatatatatatatatatatatacatatatatatatatatatattatcgatgatttcaaattatctacagtatttaaaaataaataaaacaaatagattttacaatgattaaaatgaaaaaaggaaattaaaagaatgaaaatgaaaaaaaaacactaaaatttaagaaaaatgtatttaagccaataaaaaaatcaatggtcccgaaaaaaatgttataacattcatcatcgttcaatttgaagaatgttaacttgtgttcacaattcacataatctttttaatatatatttattacgaagtaaaatttatgagggttattaaatgaaagtcattaaatacaatatgagaatatgagattgatttgcatcatttagtaggatatatatgcatttcatctaatagaatatagcaaggaaaacatgtcaataaatctcgtgttataaacaattttccattctataatactaatcaaaatgatttgattcttattcaactaagttaaattatttaatttaatttacaagattgaattacatgaacgaaatgtatacaaaacaatttttttgcaatgctaatttatgaactatcaatttcaattcaggaatgtaattagaaccaaaagttaaaataagacaaattactcaaattcctagtcaaagataaaagaaaatgctttgcaattattataattatatttgaaaaccaatcgctttaaacatgtgccctgcaaacacccacgagttcatgacggtctttccgaaagatatttcacatgagccggtggccacgtgtcccataaccgtggctggcgccgtatccaccatccacgtgcaacagagcaaacatggcaagggggtggggtcgcggggcccacggtgttttttaggtgggggctacgtggctggaaccgcatggtgcagggttcaagttggaacgcccgagggggacaagagtcgctttcctccagataaggatgggctttttgtgggaggtgatgtcatatggggttgtgtgcggtccttgtcgtgaggggcccaggcccacgtgccagcccacgtcctggtgctctcagacgcggtggtaggttgtgagcgggggatgttattgtgatggatagcgctgacaacaacaactcatgctgctcattcaccctccccttctccctctcacttctaaattctaatataaaattgctgtttgataaattaatacaaaacattaaaaattataaaataacaggcgtgtgtttatctgctaaaattctttctacaacattaactttcaagtttgaacctttcacgacattactttgttggataagcaattattggttgcctttattatagtattagctagtttatagatgatgtttttaatttttagtccaacacgacccctccaatcaacaatatatgcatgaaccgaattgatacaacacgaccccttcaaatggaagatgttgatgcagttagcttctccgtgtttgttccttctaggttttatgcaaacctcatctaccatatttgttcaagctaacaattggggcttatctgttttcgggataaaggaattgagtgctgtcttcggtcccaaaacgctcctttcttgctgttgctttgtgcttaaaaccatgtcacagtatcaagcatggtgtttaggtggggtttttggaaggttggtggcagaggacgagatcttttttatgcagagaatatatacatgcatgtttgccataaaaaggaaagaaaatacttaattcattcttatttataaaattcaaatttaaaataattattatttcttttttataaaatttaatttataatactttttacattaattatttttagactaaaaatatttctcgttaaaaaagaaaaaaatatattgacgaataattaaaagataaataaatattaataacaataataattttaaaataaattaaacttaagataaatttaatattattaatttaattaattgtttttctaatcttaataaataaaataattaatttttatatataaaaacggagagagtacatgttatatatattgtgttcattacattaaattcttaggacctccaaggctagctacaagtcttcaagaggttcactggcccatcgtaagcctgaagtgtcgtacatagatttaaacgaaatatatccaacattttatttttcatttgattcttaaatctttctcaattttgaattatagtaaaaagtagtaactttcaattttgataattaaatttctagtcaatttttattcataacgagttatgttttaagatatctttcttttcttcaaattcactaactgattatgtaagttaaaatttataaataaaaatttaggacgaataaaaattgcatccgttcatagattaaggcacgtgatcactgcttacaaagaaatttatcaacaaaagattactaagaagaatccatacaaacttttaagccaatattattttgttctaatttcctcgttctaaagtaatcatcactttaaagttttatataactaccctaaagtttagagagagaaaaaaagtgacaatgagaataacttatatttttaacagaatatattattaattaataattcatctattaaagaataactaaaatttacaatcataggacaatagggaattaatgaacactgatggaaaaatgaataaaattgaaacaaaaggtgataactaattttaatgtgtcataatactttcttttttaatttcttttgctgtaaatatataaataagacctatggtaataaacttatatactataaggtaacttgcaaatatactgtatagaattgacttgttgaaacttcatagggaaagaatctattcaccataatttagagtagaaaaaagaattgggtcttcgatgaatattggtagaacaaataaataataaacttcaagagtattctgacacaatatattcatgtttaaaatttattgagataaaaaaaaaaatcgtgtgcgaaatgtattaaataagcagagagacacaattgttttcataaattttgataaatttctactaataaaaaaattgtattaattaaaaaggccgggttacttatatttcttcataataaattcgtgtaaaatgaaaatgatgtttagtaagcaaggtgtattatttcagaaatttcctaatcggtagtactcctctactgactattctttggtgtaagagatactttttgcataaatagagaactaatagtgcacgtttgttatagatcaaattcgaagaaatgttcactttttaatattttaaaaaaataatttcttgaaaaaataatgatcgatttctataaaataaattcaaccaaacactcacgctgcttgttatgaggcttgttccttattattatggcttcttttgtttgtcaaccttctggtccctaacaaagcaacaagtagagcatcaaacttaattgtatcttaatagtgccttgctatgctactttgaatactagtactgtgactgtagcatgattaggagaattcatgaagacaagtatcacaatccgaaaaaagtgcaaattgttggtcgatctataatcaacatatacccagttggattttaatttataggatacaacactttcaattttcctcttcaatggtagtaattaatgaaccatttgatacaatacacacacctttgggtttaacgaaaggccattttctgattaatgattactcaaaacctggttatagaactgaaaaatctattttggttagttaaagggaatgtgtgtggtgcctacaaatctattcatggatggacactagagagcaaagaacactttcttacgttgagtggccactatctcaggtcctccaagataccttctctgtagcatatccaaatgaattgacattattattggatcattatgagagaaattaagaaggtcacaattgatgttgaactttcgggtattggtacatgcaagttattaaaaacggactgagaccaatctttaactcaggaggaaccatgcaatcagtttatgttcctataatcaaggaaaatcatccacatggacacacctaagtgttaattgagacctagagagaaaagaaagagaattatatttataatagatggtataatatatatgatgggaaaagaaatatagatattgagagaaatattaagtgataataagacctttgatgcattagaatcaatatgcgaagtgatcaaattgttgctgttcgggtcacacattttcaagataaaaaaaaggccgggtaatgctatgttctctgaacaaaatattctaatttattaaaaattacatggaggcaatatatatgtgtaggaaagtttagtatctatcacgaaccacgcacaactttgattcgagtgcgtggattaacaactcaatgatatataactgtgtgttaaacattgggaataagaagaatattatccttttttaaatcttatcttgtttaaataagattattctttttaagagataaatgtagtttatacaaacaagaataaatagatgaattggttcttaaaagatgtaaaatataaatttagtctctaaatatgtaaaaagtatgataaattagttctgtttttaaatttgtgagaccattttgttattaaattataatattaacattcaatttgataataagttatatttttcaatgatcaatttaacattaagttgtaaaatttagatacaaatttgtcattatattaaattgcttgtttgattaattttttgcacattttttacattcaatgactatttttttttattattatataaagattaatttatcggcgtctcacgcttttaaggataaatttaggaagattttgtttcatactctttttgcagggttggtattttgttctaacttttgcttcagttttcttttcttatgatgaatgatgaattgatgattgtaatgttgtaatttcgtaatttgttgttcaagtgatttaattaaattgtaagagtaattaaatttatatttgagtgtctataattaatttatgatttatgtgatggtgctttacttatatttgcatgtgtttagtgagattttggtgagtttgggctcggagaaagatgaacttatgatggttagtgaaaggggtgtgagtttagcatatacttgggtgtagaaaggaaaaatcttttcagtgctatatctccttaaaaccttcatttgtgttaacctctctctctctcaacacatttctcttcacaattctctcttctctaagaaccaccattagagaactttgaaccttggtgttatgcaaaaatatagcttatttctcttctctatagtgtttgttgactgaccctaggtacgatagtctctcattcttcctctctttgagttcattttcgttttccctagagcaatcatgaaatttcatggaaaagctatgttttaaggggttttgattatgttttttggttggctttggggttaagttaatgctggtatggtgtggttgttgtaggattgaaggaaagttcctcactaggacccaaagctcactccttttttctttcttcttcaaagagtcatcatgttgggtttatataggtaacgaaagctttatcattttctatgcttaggttgctatgaattggtttcaaggttgctagaaaatgaatcatgttgttaaaaatgaaagttttaaaatttgggttgttgtttgtttgatgaatattgactaaaagttcatatttgtgaagtgttttaatgttgtttatgtatttggaattgatgggagagagtttgagtttattttgagatgacttggaagccatgagaggcaattctgcagaaaatttgaaattctgcagaattcgtgttcaatgtcgcttccaatgaccatttttgtgtttagcgtctagtgaccattttcacgttcaacatctaggtaccattttgagtccaatgataagttttgagtttagtgaccattatgagttcgatgatcaattttgaatccaatgattaattttgagtccagtgaccattttaagtgtgatgatcagttttgagtctagtgaccattttgtgtctggtgaaccattttgagttctatgatttgttttgagtctagtgctcaatttttggtccaatgactagttttgatgtggatgtgataaatgattgttttccttacataaatgaaatatttgagatcttaataaatttatgatgatatgagatgtggttacgatgatattattttattatttagagttgactttatgttgagatcgtgagattcacgttcatatgagtttttagtgaattgtttacaataattcaaggtgttgcaatgtattgctatgcttattgaattataggtgggttcatgtgatgaacatatgaatggtgagtctatgatgttacaacctcttatgatgttgggattggtgaatgaatttgtgataacatatgatattgatttgaatgatcataacatacatgtattgatgaataacatgaaatgtgagtaggtacgaaagttgggggtgctaagaagaccctcaacctagtgttggaagttatcatagtaactgacgtcaaatggacatatagaatggatgcataggtaaatccctagataggttaaggtctttactagtcttatccaggtaagccactactcatgctcatccattttttataaaatcacacttcttccacaaggttaattcaagtattcccgaatggttagatcatagagtgcgactcttggattaatcgctcaaaaggtgaaatcttctgagtaaatagtcaacatgatataacatgacagttaaacatgtgcattgataattgtgacttgagaatgatgtgttacttgaggaattgtattggtacacgacaattggaaaatgggggatttctatatctcttttaacatattgatcttatatttttttttatatgttgttttcttttaaaatgagcttaccgttgcattttttgttgaactgtgatgatggtgtcatttaatacgagagtagattatgatgtaacttttgaagagtatgtcacttgtgattgatgtggatttggtggtgaacttagggacaatattcgactctttgtcatttatttatgttgtcttggtgggaatcaacttaagatttgtatatcttcatcgatttatgttgtatttatttcctgaattgaacccttgagttttatttggagatttgctcatgatgtttgatgatatagtgtcttggaaaatatatacctttatgttttaagactcgagaaccttttatggataaaatttataggacacatttgtatttatgaaataaaaagttacatgtattttcattaattaaattgatttaagagttttaaagggactaaaaatgaatctttctacattagagacttagtgtttcatacaatgacatttgaggttgttacaatgatcattcatattttcttaagggaaagctaaataaaatactagtatttggtttgaagaaaaaaaaattataaccaagcaaagaaaggataaaaatatttttctaaaaaatggttttgctaagcttaatcattttaaataattaaaaattgagagttctttttaaataatacgtatctctagagttgatgtttaaataatatggtttgtagtaaaaagcattgaaagaaaaccgggatacaaatggaattgcagggcgtttgaatgaatgaaatgaacccactataaacggttatcacatgatatgttggttccttaatgacaatgtttgcaacaaataaatattgtttgacaaataatagtaaaggtgcaaatactttcaaagtgaactttatttcacaaagatttttgttttgacaaagatagtaagtaatagttgctttattgtattaacttgtaaagtttattaacatgatattttattttattgagtctcgcataaaacgtgaatctttattttatttcgtagtcttgttaattagtgctttgatgacataggttaaagagtatttaatagattttactaaatattttaataattttagaaatataataaatattcatatttttaatataataaaatttatattttattttattttccttaatttttaatattgaattgtctttatttttaatataatatccttaaacaatttatttttactttttatttttccttaattaaataataaaatatttaacttttgctttgattttggtatcatttctctaacccacgcatcaaagaaataaaaaaaaaacatttatcatgtaaaaaccaaaaaaaaaagtcatataatatttagttcttaagtaattaaaaacatttataagatatacttaaagtctttgattttactatcagtataataaaaatatatataaaaaaactaataaaagtgtgttaatgatttcacaacttagaacatgtttaattttccgaggaaggggatcaaacgtacggtaggaactccaaactcagtttgggtaaatgtttggtaactaaaaaatgtaattttttttacccataaacacacgtttatttcaaaagcaatagaggacatgcttttcaaagtttcatttccgttgatcttgtattatgataatatctgtaatttttaccctcacttgtccccctttgcacgcacaacatcaacacacatttcttttttttacttgtaaaatttaatttgaaggtacaattttgagtgggaattatgaagaatattaatattaatcaccattctttacatttaaatccacctacttacaagtcttcaatctatttgtggtactctctcatctttccaaatcctggtcctctttcatatcttagattgtagttctcttgttgtcatttcacattcattcatattctgtttcaaatttgtttttccttgggatctttttgattttttggtatgaaaaaatattaatactctaatttttacaattttttactgattttgatttattgaaaaaagatattatcaattattttattttacacttttatttgttaatttggttttggcttatttgctttccatgagtaaagttgtcatgaactttaatgtcttggattgttgacattatcattgatggacacgtattcttccaatgtcatatcttatgaaatgttttgtccagaagttatatttgtatcactataattttgtgatgtaaaaattgtattttataatgcttattgaaatgttatcttatttaagttgaagagaatgttaactggtgctatttatattgtcatcatcaccattaagaaataatgaccaacaacaaaacaacatgaaattcaagcacaactgagttgtttatcaaagcatgcttgaaggagttctgcacaatggttatacataactttattagaaggaattctgcaattgaccatttaagacataattattttaatttgaatattaatgttgtttgaattatattatttattcataaaattatttaatattgtacttttctaattttttctgatttatttaatgtttttaacaatatattactacttcatatttaataataagacattaatgaatttcatacccttttcagtaattatacatctaaaagtacttttcattattattaccaaacaagtttcatttcacaaaacatacttttgaacgtaaaagtatccaaacacaaatctggttgtataaactctttttttttttttttatcaaaacttaagtttcaaacatacttttaatttaaacttaagttcacaaactttaaaccaaagatacacttactctttctatggataagtcagttgatgcactcctgttgtgcttgaacgatatatctaccttgcatgtagacttgtattcacgttatgttcgcatttttggtcaatttgtttgggttgattatgaacctgggctcacctcaattctgctaatggggaattgcaattgccaccgatgttttgctattcatgtgttttaaactttttccccaaaatgcattttcaatgaaaatatatttctgttatataaaatatacattccactgtagtatatggtgtgcgaaaaaaaaaaagaaataggtttttgttgtttcaaagatgtattactgttttgatttgcttttcacctcatatattataatgaaaatacatttttgttgtatattttatacaacaaaaacatatttatgtatatggggttttatttttgtcagtgtctacaaatcagatggtgattcccttctgtctccaatacaatagaattatgattctgttgaaatggaaagccaaatgtgagggaggagagaaagggaacggaggagggataattttatccttttactattttttgtaaaaccttggggtgagaatagcaactcccttgctaatgactcttgtatttggattttaattgaattgggttgaaaaggagtccaatgaatcacatgacaaaaatttggtgttggtatccatcactcccactattgtatcaggcaaaatggactttttgtaatgtaatgggaggtgcagaatataataacagaagtgcaggatacaatagcccaaaaatttgcataatttttttactactctttttttactagtcttgagaatttatttcacaattatccttgaatattgaatcatcataaattctgattgaattctatcaagtataggacaaatcctctttctatgaagggtgtcaacggtcaatcataggagaaaacattaaacactgaacataaaaagaagtgttagaaacaagagctttattccacttagatggaaccttgtgacaactttatacatttttaaacacaaaagataatcaaccaaatagcaggacgtggattcataaacttagtactttgtattgtttgggcattttcagtttgaaatttactaactatacatgtaaagttagtccttcaaatataaacttgtatatccaagattttaactcaattccaaaaaattaagctattcatataaataatataatatattattattttgcatacacacaattatgtataatacagataggtggatgtatgttatgatttgagggaaacaaagcaggtcgcagatctactgggtaaagcttaattgtagaaactctcaaattcaggatcttttagttgcacaaatttattgagaaacgaagtcattagggttaaaccgacttttccaatatcactcattcataaactagtttctagtataaataacataaagaaatgtaactaacattaattggaaaaagcaaccacaaagatttgggaccaaaaggattagcagtaaccattgaataaatttcttcagcttgagttggattaaaagcacgaaatatatttgtgccatcaccatcttcaaataaaatattttctacaatcgtagtgagcacccaatacaccagcaactcccataatatgaaataggttttaatgtccaattatgaaacctttggaaaaagataatgaatctaaatatagctgctacaccaaaactaggagcaaggaaccatcagaatggcccaatggataaataaagaatacaattagataaggaatttttattttcctcctgatttcttttggttgaacttgttggctgatgctgtttgtacttattttcctaggagcttctagttttttttttcctttgggcttaggccctttactcacaaaaaacatttttttttatctcttttagtttattgtttttatattttctaaattgatttttaatatttttttaaaagttcaataataaaaaacaatcttatatcacagtaaaaaagtttatcataaatccaaaatataatttatatactaaaaatatttatttattatgaattttagttataatataatttatatattaaaaaaattcattaattataaattttagttactaaaataaacatttatcttacacattataaagctaaaatatgattcaccttaaaaataaacatttatcttatagtatctatcatgattttggttaacagtgtaaattattttacaatgatatagaaattaaactcgttataacattaatacagttgatttgtttttcttatcaatactgaaaggcaacgaattttatctactggaagaataaatggaaagaatcaggtccacatcaatttaactaaacaattttgttgcatatatatatatatatatatatatatatatatatatatatatatatatatatatatatatatatatatatatatatatatatatatatatatatatatatatatatatatatatatatatatatatatatatatatatatatatatatatatatatatatatatataaaatagagagcgcacagacacatactccctcaccacaccacagtgagtcgcaagagagacaggcaaccctttttttcccgccacgacccccgcaagcgccggcgccccttgccggagaccacggaggaggagaggcccacaaagaggccggcgccgccgcgcacggtggtcgtgatgggcctaccccaggactgctccgtcctcgatctcaagtcccgattcgagatctacggggctatctcccgcatccgcatcgaccgcgacgccgtcggctacatcacctaccggacgaaggactccgccgacgcttctatcgccgccgacctcgacccctccttcggaatcaccgttaactccaaaaaggtgcttctttttccccctttctctcacttagggtttcggaactttcttttttataatgaacattgaacgtttagaatttttactaatgttttgaatactacaacggtgaggtttgaagctgaacgcaattgacagattttcagcttagttgtttggaactagataaaatttggaacctttgaatttgaagtaacaatgataagtcctgaaatttaacaaatttgacaaattttctacccaattgtttagaattttggtaaaattttaacctttgtgtttggatgaacgtatttacttaaaattgatttggtggtggagttacctttttaagctatttgaaactgttttgattcaaaatcaattttgaaccaaaaattaatttcagtgtttctcaacaatgtaggttatttttggataaaaagtttaaatcgtgtttttgggaatttcattgtatattcccaaattctagaaacatgatgtaaaaggaagaatctgttgctttaggagttaaataattttttaagtcctccaactgatgttcaaacatgcacatgaattgttacatgagttcctgatgcgcgggaatcaggagtaatgaggaactaacgtgttcaatcaagatgattattgttttaatatatagtaaatggataaatagatttggtagtgaagtgagttacctttacacttaaggcaaaagctatttggaaccaaaattttgaaccaaaattattttcatagtttctcaacaatataagttatctttggacaaaagttgaaaacatgtttttgagaattccaacgtacattcccagattccaaagcacaaaaatgaagaaaaagaagtatttcttgctttagaagtaaatgaatttttgaggtcctccaactgatatccaaatatgtacataattgttacatgagttccttccggggtgaggagaaatgcgtgagaaacaggagtaacgaggaactaacatgtgttaaaaacacacataatggttacatgaattcctactggggtgaggagaaatgcgcgggaaacaagagccacgaggaacattttcggatcattgtttcaatatatagtaaatagatttataagggaaatttgaaagagattgtttgttgtgtttaacaggttcgggtgttgtgggcaacggaccctctagccatgtggagggaaggagttggtaatagcagggacaaaagctctatgtcaaaacttgtgcgtgctgaggtacccttgagcaagcatggaagaggtaatagactctcttcagccatagggaacaccaaacgtagtgaggatagctcaggtagctcggttttagaagtgcctttcaaggggagagaaattgttgcttacgatgatatcctctaactatgaaaatctggtattgttagagggcaatcttattatgtacaatgatttgaatttggcatttagatctttgtagttcttttttttccttttgttaagtatgtgctcaatgagatactaggaagtaacttacggaattggttgtgatgtttaatgcctagatcgtaaatgtaatgtaaatagttgttggttttacattgtattgtctcgtcaattctttgggtttgaaagtgtaagatgttctcctatgattgaaagtttaagatgttctcccatgattgttcacttcagaaagcctttttattttgagtatactcataaattagttgttaagagtgtgtatgtcgaatattttggttgctcagatagtcagatctttaaaactcattgttagtctccgattttataaaacggcattcattttattcttttgatataaacttgatgtaaaatggctgtaaaaagaagagcaaaatttaaagttagcaaatgatagagggttcttaaaatatcaaaaactgaaatgctccatttatatagttttgaagactgttttataggtttggtttttatttttcctcgattcatttgactccttggttttgcttgcctcattgcaattttgaagtcattggttcgtgaccaactcagacattgattacgagtttgaaggtccgtgctttgaactaagaattcaatcttttattatatacgtggtttaatatttatgattgaaatcaattaaaatatactattttttttattacaactataaaacaaatgaacatgatcaacgacactgaatgtgtatggattagactttttcctgttttaaactctactaaactttccagtggtgttatgatttgccaacaatttaattgaacggtttggttgctgcgtccattgcaaaacttcaacacatttttcttcatttctatatttgtataattttttatattataaattgagaagcagaaatttttttgttcagagtgtgcctaaattttatgaagtgtttttttattttatttgaaggaatcaaatacaaatatcaaaggatttacaataatttccatatcatgctcaacaaactgaattagatttattcgatttgtgaaataatttttttatatattacaatttaaaattaacacatttattaaattatctaagtttacgtattaaatttttaatttgattaagatttgaacataggttgtttgaacttactgataatgctattttaactcattatttgaatttaggataaattagcctgcaggttcctggatttttaattagattcctgtactagtttcttttaattggatatttgcacctataattgtagaaaattatgaaattttaacaaaacaataattttgatatttaaacgtaatttctatcatatcttataataatttggtttgttagcccgtgtgcatcaaacatcagatatgctttaagagtttgttaaaatttgaagatttaatattattttatttttgaacttattcattttttttttctgaatattgaacttattcgaatacacctttctattagaaggcttgtatttttttaaaaagccagaaaaagttaattatttttaaattattaacaatataaaaaaattatactattattaattgtcataattgtgattgatgaaaagtataaaaaattaattattaaactctcctctctccaaaaagtaatcgttcactattaaacaaccacacaacttatcatattataactggaaaaggcaaaaacaagagtctgtttcgtgggataacagttaacattgtcgacactcgacagacatataaagtaactgaagctcaaaacggtgatggaagaaccgaacaagacagagaacgaagatgacagggacgaatcagaacaacgagtgtggagttggggtgctggaaccgagggacagttaggaacaaagattcttcaggatgagcacttccctcaactccttcaccaattctctctctcctccatctcttcccttgcctgtggcggtgctcatgtcatagccttaacctctggtatcaactccatctttctttctcactccaaaattcactaatacacaacatctttttttttctcctctttttgtcttgatttgcaatttattctggtcctagtattattttagagcttaatggtaagacaatctcacttttacattctcaaccaataaaccaataagaaatcatccttggtccgacgtcttttaacgtatagcatgtttggatatcttggaaaatcacggtgactacctcaaaaatcaaaaccacggtgtcaccatgatttttcaaaagcaacgtgttgcttcatattccctgtgaaattaaaattgattttggctcgcctctctgccaccccaaacatgttaatagttattgaaaaatttaacaaactttcattacatggtggtttgtgattggatgataatataaatttatgctgtcactgcaaagattattttatcttgttttaacataatgataaattgtagctggaaaggcactatcatggggtaggggcaattctggccaactgggccatggggaggttgtgagtaacactttgtatccaaaggctgtaacatcattggatggctatttcataacccatgtctctgctgggtggagccactctggttttgtttcaggtttgcactcttctatctctgtctcccctgtttttatgaagtgtatgaacatgtttgggaatccgttgcaaaattatgtttgaggcaaaactaattttgctaacggatcatgacccttgcttttgcgttcattttgtttttaactgttggatttatcttgaaacgtgcatcgcagcgttttcaactgcaaatcaaacattcattgtaatgtagttgaggtttgttctaagttgaaagtaattagttttgtcttttgattagttctttggttggttttcagatactgggtttgtgttcacttgtggggatggctcctttggtcaactggggcatggggataatgcctcacactgctctcctgtcaaagtgtcatgctttgttgatctgcatgtggcacaggtggcatgtggaatgcgccattcccttgtcttgttaaaaggtattggattggttctgattgtttcatagaatatgtgtgtatctctcacttttttagtactttaattttgctcctttaattgacaaaggtcgttcattgtgatgcagattgctcaggaaatcaagtttatggatttggctctgggaagcgtggtcaactgggtgtcagcaacgatagggtcaaatctgttaatgttcctaaagttgttagtggctttgaaggtgttgaaatcgttggaactgctgccaatggtgaccatagtgctgcagtatctggtaaatccaccactttccccttacaagatatgtgtggtttctgtttttcagtaaaaatagttagcctgaaagtgccatcatattcttctctaactagttctattatctttagttgatggacatgtttacacatggggaagaggcttcaagggctttgaagatgctcatgttcctcagtgcttaaactcttcattgaattttaccaaagttgctctgggatggaaccatgctttagctatgagtggtatttattgacactacatacccaacaagttttatgatttccttacttctgccatctccctatttaacaagctcattttttggataggtgaaggggaggtttatatgctaggtggaaaccaccttggagtgcttagtgatcttcagaatataggccctgctaagcattttcctggtaatgcatttgaataactttgaaccataaagacatcataatttatgtactgttcttcaaagtacatgaatttaaactagatttaaactatccattcgttgagaatgcccttattgccattgagttcagtattactagatttaaactgtccattcgttgtcatcatcatacataaccttcgccaatagttaaatgcaaataaagtcttgtaaactgagtgtatcttttggaaagttctcaatggattcggagaccaaaagaggcatccaatgtgtagaactattgtaggttgcgcacctctgtgaaaaattagtattatgaccactgcataaattcataggtaatttaatgggtttagaaaaatgcgtttttttgtatcatggaaaatgtttaaatagcattactcacatttatattataccttgttaatatatagtagatttaagagaattcaatttggagaaagtccctggccttgatgggacgaagattactgatattgctgccggagctgagcattctgtcattgtcacaggcaagttgtagtcttccttttgttcttaagcaagtttagaatcacataaaagtgctgacttatttccttcctattttcagagcatggagaaataaagacatggggttggggtgagcatggtcaacttggtttaggggatactcgcgaccaaaccagtcctgttacagtaagtctcgattatgatctgaatgaagctgcatcaattagagttttctgtggaagtgggttcacgtttgctgtaaccatgccctagagtctactcaaacttgattaaatgctaatttgatatgcatgtcaaaagaagttgccatcagcttggttctggttctgaacttccagtggcagtatatagactgatacatgccaagaaagtcttctgcttctcaaatattattttggaggctgcattgtgctggaaagccacaggctccataggcctctcacaaatttgagaactatgaaaggaggtgaatatgtatgatcctcttcccaaccatacaaaaaaaaaaaaaaaaaatagatagctattcatctctttccaatttatggactatgctagaacatggcaatgacattcccagtataagtgggtaactgttcgtcatatattattttccttgcaactataagattcaaatttttagtccatttttttccttgtaactataagagtcaaatttttagtccatttaatactgttattctcccaacagaaagtgaaaggaattatttcggtttcttattatattcgaattgactggaaatttggaatgtcaaatacggtttcttccaccttcgcggcttatcaattgaaaaagcataaagaaaagaaaaatatcaagctagatctcaaaagcattaatttctagaactgtaaaaatatgctaaactgaaccatttctcaccttatacagtagatcagaaagtatgccaagaacaacaatcaaaacagtgaatacgtggttatgcaaccttattaccaacatttactcatcatttgatacggtgaggcaccacttacacaattacatgatcatgctaaaaatgattgaatgggattcgttcgacattaatcaagatatctacatctagaagtggtacaaggaccaagtaaaagaatcaatgaactgctcactgaaaattttgtacaccggtgaaaaaatggaaaaaaaaatggctgactaacctagagcatgtcatcctcttctgtgttctacagacattatctcatgcttactctcttttacatcaatcataaatgatgagaagattattctcatagccattgctggtaacaacagggcgcaatggatcaattttccattctccatctacaatgaacttcatctgcaacagaaaaacaaataattaaaatgcctgctatgtgtatcttattgagcacaatgtcaacaggtttaagaaatcattagttgattaaattcaactaacctcatatcttccaggatacagctgcaagttcaaagaaaatataccactacttaacctctccatttttctctgcaatatacttacaatcagttaatatttatgtatttacgtctaatgtgctcaaaagaagtaatctgaaaagcattaggggaatctatacaaaaaaaaaagttatgctatgtacagtatgcattcgatcatattccaaatcagaattgattttgcaaaatacaatggcaaaatggaaagcagtttaattttatcattcaactgcctaaaattgacccatgaatcctagacagataacacaggcacactatcaggtaaaaaatagtggttatgaatctttaacccatattatatgcacaaatcctaagtggtgtatccttgaacacgacccatgcaacgcaaggtgagaaccgtgaaaagttttagtacatctatttacacaaatgatattcattatgaattgttttagtacatctacttacacaaatgacacatcggaatgcattatggttgagtttggaaaagcattttaaaaatgcactttcatgatgtaattttttaatacctttttttatatcagaatctactctttctagcttaagagaaaagcactaaaactgttttttttgttatattcattaaacaggttttatgattaaaaaaatctctttacttataaaaaaatgtacaaacataaaggttctaatatctattataacaataaaaaagttatcagaaagataatataccttggtggaccaaccatcaaatgatcctgttaaaagtacttctgaagcactattaggccaaactacacaagtagtcttcagaatttgcaaagctttttgcgcattattaatcttcttctgcttttcttcaactaccttatgtgcatccctgggaaaaaaggatgtgatatggtcaagatttaggatatctatctatctatctatctatctatctatatatatatatatatatatatatactccctccatccctctaattataaggtcctttcaactaatttacgtcccttaaaaaaagtagttagtttacttaatcacatcaaatatgtcaattgtttgtcctatcattttaaaattatcattttcttatctctttattcacttaattgtttcttattaatgtttggacagagaataattaagtaagggtatgtagggaaaaaatagttaatgcatctagaaactagaaaaggatcatacaaaagaagacaaacaaatttctgaaaagagtcttataattagggacagaaagaatatatatatatatatatatatatatatatatatatatatatatgacacattaattgaatggtgcctgggggatacattattgccaatgccatctttccttctaacactgacaacttagcccgtatagaacgcaatctgtcctgagcattcatgatctcattttcctggaattcccaagcatcggaaagctttgctagatcatcagaagagctcttctggacctgttgaagaatatacaggaagcaaatcaggactagtttaggttcccaaggagaggcctttatattaacgtttatagtaaatgaaaaactattctattgaaagagaatcattcttctagtttcttcgcagtgtagaaaactaaatgtgtagtagctagtaactgctcctacaccaattaaatcacacaaaaactgttcagtgtcttaaatatgctgaattgttctcaatttatcaacccacagcctgtgaaactccttgctagcaccagtcaatgcacacagtcacacacagcatatctaaatccatactaagacatgagaaataaagagatgccccaacaaatgaaaggttttggatagaagagaagtaacaactaagtttcttttatgaacaacattggatagacttaatgcagtgttttagtaacatttaaatttcttgggagtatataattcaatatatggtattataaagacaaaattgataaacatatcatgtttgtttcctttgttggctcccttggcttgtatgattcccgcagcccaaaacaagttgcatacaaaaatccccatctgccctccaaaataagtggcagcaaattaccttatttatcctcatacaaattagtcaggtccaaacttatcgcaaagaataaaaaaatgctatgaatgtgctatgcagacttcactagggcttaaaaaacatagagaactgcagcaaagatcaattattgggtatactttactgtttttcatttccaataatttgtaaatgaaatccccccaccgccctctctttctttggaagagtgaagatcataggatcatgggcaagtgcaactctcaggcggcaaacaggtaaatcttgtgttgtttttttctattcattggggtaattcacagacaagtctaattattattagcttattaaataattgcactcaccatctgcattgtaattttatccgagctagacctcaacaagtgaagtatagaagatagctccgattccagattctggatacgggatttaatgtcactgtgatttgcatttccatcaagagaatatagtcctgtttctctgtttatatgttcagaagataactcccttctgttgaggatatcaggttgtcttgaagcgtcactcatgcctcctttctcagtttcattgggaacaatttcagcatctgttatgtcataattatgaagatatcagttgatcctgactacaataataagaaaaccttaaaatgtaaactagattaccttcaaaatctgtatccagaaaaccagttctctgaataatccaactcctccacgtctctggcttaagcgagtttcttaaattttcagtacctaattgagatccgtgcggatcatgtttgatctgagaaccactgagatgactgctagtagagcttgatgaggatgctctgctaccattttctaggccagcggccatctttagaacacaggagataccaaaagaaatattttaaaacttcaacagagtagtgcggggcatcaaaagtaatatttcaaaaattgattctctttcagcttcagggtgcaacagctcattgccatgtgcattgaatagtaaaactatagcttaattagctttaactgataggtagaaatatataatagaagtaacatcggaaatgtgaatgttaaatataagttttcaatattcaaatgctcaagaacttcaacataggtaatatatttcttttcattttttatacttttggcatatgatgtaaatagtaatggaaactaaagaacaacccagagcatttgaaggggataatatttacttactgtatccgttgtggttctaggatcccattcatctttatcttcattattttcaaaagaaacattatctaagtcaagtccaaaagatctatttctttgtttctccaaccgactcaatataccctcaatgcctgattttccagcttcaattcccctgcataccagaaagtaacacccaggatactgcttgtcacttgaagttacatctaattcatccatttgattacaggaccaatacaacggcatgaaaaaaaattgagggtacttataaattagctcatcttgctagattaagcaacaaaaacaagccttctcccactgggaggggcagtcacattgattaatcgacactatcagattctatcataactcatatctacagagaaactgctggcctctaaatctcacataatggtttgactataactttatttggtgtccctctaccactagcaatcgggctaccctttgtctgatttgctttcctcactaggcactggggattccacatgcattctccacacatgcttaaactacctaaggcaagcttctaccgtctttcttgtaataggttctagtgccaccagacctttctctcaaatgcatccttatcctatcttatctatgtcaactcatttaatgcaacattcttatgtatactatatttagtttattctgttgttggttttgtatcacctaacattcaattccatcaaccattgaaagtcttacaactatagtactatccagtaaagtctcccctatatctttctgtcgcaaacaacactcaagtcactcctccatttaacctaccctgtaagaatcttgcagcaagattaaagctacacacaaaatgggcccatgtgtggccctcaaaccttccttacactcaaaatgggcccatgtgtggccctcaaaccttccccacacacttcatgccaccaaaaagagaaaaattccaaacatgcacaagcacggaaaagcgggaaacagagtattaaaaagcaaaagtcaagaagaggtgcgtcaatataacaagattctcacactgaattatctgattgagaaggagaagaagaagaaaccccagaagcctgagccccattaccctcaattccaccgccactattatcttcaaaaccgagaatttcgctggacccaccattcaaatcccacccaaaagcgagccaccctccttcgttgacaatagcgttgaccaaatccaccctccctgcagcaaccaactcttccttggtcggaaacacttcgggcttatcggtattctgcatgaaatccaaaatctgcgactcaagagaggaaaactctccgtcccaatccttgcaccgccgcaagaacccggtgcaggacaaccacaaacccttgtagcggttcaccttccagagagaagaacggagaaccgaaccggtttcaaccgcaaaccggcgcacccgcccggtcgaggcggggaagtggagtgggggggcgagggaaggggtcaaatggggcgagagcagcgaaaggtaggagggtgcggtgaggaagtgcatggttggggcatttcgtcgaacagttactcggcgagagagaaacagagaaagagtgatgagcgcgagcaagaaagaatggaaatggaaaaaacaaaaaaaaggggaaaagggtgtgtagtacgaagagtgagactgcgaaggaagcaacgaacaatgcttggagtagaaactagaaagaaaagggtgttactgtttgttagtgtattgtttgttattatgatcacaattatgttatccacactttgtaattacgcacattgttaattgctcactgtgaagagggggacaaggagacacggggagaaagagatagcgtgttcctggcttttgttttatttctcaccatggacacttgacactacgccaagaaagcgagggctcataatcctcatatgaatgaatgcactcacgtttgatgcgactataaaaaataatgtacaatttttactagggatattcatccaaatcaaattgagtgtttggtttcacttccaacatccaaagacaattgtatttgatgtggaaaagagaaacaactattacaagcttatgcgttaaaactcggaaattaatagatttgtatcaacatgatacgcactctagcatgcactaaattggtttggatttttttattatttaggttggactaaagccaaactagttgattgggtttaggtattgaattcaccattttcaaattcgaatcaaattaactcataaacactcctaatttttaggatttttttaactttatcttggttttctttagacaaagaaaaaaatgctaacacataacaacactatgtaacattttatttcaattttttttaatgattggctgaaatttgtttaaaattactcattttaatgtgtcttaatttttatttaatgatcaaaatggataaactttttaaaaaactttatccaaccataacatagaggtgtaaaagtgacctcaaatccaaacaattactcattttaatgtgtcttaatttttatttaatgatcaaaatggataatttttttaataaactttatccaaccataacatagaggtgtaaaagtgacctcaaatccaatgagtcaattaatttgacttctacaaatttcgactagattggattagaaaaataaaaaaagttcataatatattgtcgcaacattaattactttacccgtagactaaacaagttagagtcaagttggttcatataacctatctaattttcttttttaaaaaatgttgtacaatgtttatgtatttgacatgatattttgcatgtcatttaatttgaatggtgtcattagaccatttgtccacatgagttgaacagcaatattaaatgcttaaataatatcatttaaaatgccttatttgaatgacttctagggtaggtggttcatcatgaatcattttttttaaaagaaaaaaaatgttattgattatttttttaaaaaaataattgttgaatcaacccacttaacccatcaatccatgatgggccccaccaaattggagtttctatggctcgccaaaagtatacatatagtgaataaagaagagcactaaatttgtagcctacaaagacaagtagactgacgttctctaacttttaatgtttcttaacctatatttttttaaggtttaactaattctttaattcataggtattaattaaaaaatacattgaatctcttatttataaatttcttaattattcctttcaaaaaaattcttaatcatttaaatttaataaatatttgatacatggttgaaattataaatgtgacttttatttaatatttttagtcaatctttttattttaatttcaagtcaatactgttaaggtatttcttcaccaattccatattttgaacttagtcattttttataaaaagagagcccaactcatgtccctccacacccttctaaatgtattaatgaggtattataatggatttaatgaacgtaactgagttaacaacatatgttaagtttgcatgaaaaattttgaatttaatttctgataatacaaatttaaaaaggggaaaaaaacttttaagtgtgttgaagtcaggactagtccaaaattaagattattactgcccaagcttaaggcattcaccaacaacaaaatacttagcattaatttttaactttttataaaacaaaaatgtaacattaacaaaaaaagtctaacatacagttttcccctctctctttggtagagataaaaaaaagcaagcaattttgcctcaaatataaaaaaaaatatatatgttttttcttggtctcaaatataaaaaaatttaaattaattttatcttatttaatttaatgttattatctctaaaatatcattcatttaattgagatgtaatttcaataactctttttttatctttgatatcaagttgcaataaaagataaattgaaaaaaattatattttaatttaaaatgatataatcaactttcttagttaattaatgtgtatttttttcatcgtatacttgaggcagacgataataataactttacaataattcttacaactattcaactaactaaggaaggctaaacaatataatattttcttgtttactaattagtggccaaccttccgcctatttgttgagctttattaaaaagattttaatagcctcgagaagcattgaatccaagtaatcaggtaaaatttttatcaatcaggtaaagcattgccccaacgactacataagcatgacaaatgcatgtaaccgtagctaattaaaagagattaggcatgtctacgtactgcatgcaaacttgtattttcacgttcaagtttacacttgcaagaaacatcctttatcttcttttttttctttcttatcgctgattttcatgcatgcctttccctaatagtactcttttgtgcccacaccgtaactgctgttgggcatttttttcttcagttttttggtaacccttaattataagaaacaatatatctttttttattaatttaacgtctctttgaaagctgagaaagaaataattatttaatcaaattataagtctatttccaacaagtacttattcgtttgttaggaggcaagtcttataagacatacaaaagatactttggttaaaaccagtactaatggaggtggataaccaaagaaaggacacaaaatctttctggtccagctgctgcaggagatggaattcaaaaaaaccaccacataatgatttgggttcctcaaatgcatgagcaatggagaaaaaacctggatggaaggccattccttacatcttaggtctctatctaaacgtaaaatgtacatgcaagtatacaatatatttaatgatgttccatttgttatcacaagttgatctaataattaactaagcgatttgcaggaaatgagacaattgagaggacagcattcggcatgacagcaatttcatggtgtatttggtgaaattcttcaacttgggtcaggttggtgcctcaaatattattgggatatggagtggagtgagcaattgcataccacttattggtgcagctgttgctgattcctatttgggaaaattcagaaccattgccatatcatcttttcgaacacttgcggtatgctttcatccattattgtcaaaacacatgtaacatataccaaaccttacatgcatgttaatttaatttgaaatcttagttgttaggattaaatttggtataagtcctgattcaggcaacnnnnnnnnnnnnnnnnnnnnnnnnnnnnnnnnnnnnnnnnnnnnnnnnnnnnnnnnnnnnnnnnnnnnnnnnnnnnnnnnnnnnnnnnnnnnnnnnnnnnaaattcataaaataacaaaagttacatttgtcgcattactcgttcagtccctaaaatgtagttgtcacttaaagtagccactgaaattagtaaataacaaaatatatagtctctaaaattataaattattaattaatttagttcctaaaattaaaatattaataaaattgtcactgaaataatatataatcaatcaatttaatcattttattatcagttgatatcatttaatatcgttaaaataattaaattaacacattaagtgcttaagtgatagccaaaactgtacccacatatgattgtcagatcgtaaaaattaaaatgtcatgaaaataacttttaaaatcaaattatgtgaaatatgcacaattaaataaaagaactcagcttgtcttttttgtggatgagcatgacttaatcttttgctctgttggcgattaattagggaatgctgatactaacactaacagcctgggtgccacaatttcatcccccaagatgcacatctgacccttctggccagcaagtgcgtcttaccccaacgactactcagattgccatcttaattttagggctgagttggatggccgtaggcacaggtggaatcaaaccatgctctattacatttgccattgaccaatttgacacaacttcttctgaaggaaagaaaggagtaagcaacttctttagctggtactacactgcacaaacgttggtccaattgaccagtttgactataatagtttacatccaaaacaaaaactgggtattggggtttggcacactaggtttgctcatggtatgtgcagttatcttatttttcgcaggaacaagagtttatgcctacgttccacagagtgaagcatattttctagtatcgcacaagtgttaatttgctgcagcttgtaagaagtatcgcctccaaaatccatcgaatgaagagaatgcttactatgatcccccactaaaagatgacgaagacctgaagattcctttaaccaaacaacttaggtaatgttgccaatctttctctgttattgaatatcgtgatatgactatgctatatataaaaaaatagctttctcttctaattacgatttacattacgtaaatatttagttctcttctaattacaataatatttcttaggttattttcgataaaattagtgagaagctgaaaagttacttagtaacttaaaagttaaaaaattaatttattaaattaaaaatatttaataaataattactaaagtaacttaaaaaatataaaataactaataaatatatttatattctattattttatgttatattttttcatgtgaagtattatactattaatcttatattatttcttaaaatatgttcagtcaagtttaaaataatataaaaatatatatatttagtagacattatacttttattatgttaattagtatagtagttaaaataaataatctaatatagaattaaaaaatagataaaatatagtgtttaaataataattaaatattataagtggtacaatagttaaaataaatagtataacaaaaaaattatagtaagaaaaaaaaacttatcatctatcattatcaatgtcttggtttctaatgctatagcaataaaataaatagtataattcttaaattaagaatgtaatataaaaatataaaaaacataatataaaaaataaaataaattagaataaacctatgatctattatttcatattaagtaataggaaaattctaatttatttaaaaaggattgttaactgattggcaagtacaccaaatgtccaagtaataaagacttggaagttcattgagggactttgttttatatttatgtcggatgatttccaatttataagataaaaagataagatgagatataaaagataaatttaaaagagtagagtataaaataataactattaatagaaaacagaagaaataataggaaattcaatgggatgagaattttaggacctagtatgtcctatttgcctaagatgtattatttgagatttttctctatcaattaggtgaattttttctattcacatctattaaaatacttgtccctgatgtctcatgataacaagtctatcttacctatctatctcccaaatgtctttgcaaataatcaacagataagatgcatgaagttctaattctagatgcttgctttgaagcatggacataatgcaatcactctatgtctagcaatgattttattaagatacatcttccttttagttctataagaaattatcctctatcgagcgactacttcttaaaacagatgcatgcaaaaaatttcttgtatttctattaaggattatcttctgtcgaacacccaagccccaaaaattatgcaaagatgaatgatgcatgaaattaaaagcaagaaaggataataaaaaagaaaacacaagtttgcattgatagatatgaagtatacaatacatcttttggctttttaggcctgccaaatcttaattaaggattttgatggaggagaagagatggaaaaagggaatagaaaatgatgaaagaaaagaaagaatttcctaagtgagagttctcaggctttaagcgtgtattaaagtgttcttagactcgctgtgtctttcctccttggcttgatccctattatagttgctagagtggacttgagcttaatgcaaaaaaatcttccttatttatatttttgatatttttctggatcttttttattttaatcattatttttcatatttacaagtcataaataagaaaaatatcaattcttattattaaagtaaaaaataactattaaataaatgtttttaaagatattttcaatatatttttattataaaaaataaatcatatttagtaattataaaaaataaacaaaaaatttaataaatatattaaggataaaaataaaaaaataaaaaaaattagatgttagtgttttaaaaaacgctacctcaagtaaagtttaaaaaatactaaaaattattgaaaaattataaaataaatttatttatgaaacaaacaattgaaaaattataaaataaatttatttatgaaacaaacaaatgaattttttagttaataaaaaaaattaaaaactaagtgaaatgtcttcccaaatataatattacagaattacaaaattaaaaaaaaaataacttttttgtttcttttcacgagtaaatagtttgtataaaggaacgttgcagtttaataaaaaaaattataccatcatcaaactgtcaaatacaataaatgtgttgagttttattataaatatctttaaaatcatacttattataatttttaattagttgtcaatataaaaaaatttatttatgattactgtacataaaatttaaactctttagcatatgggagtatggcaaaaaaactggggaaaatgtcattatttgtctaattaattaagggcaaactccttgctaattgtgtagtcaagattttgattttttgcacaggtgtttaaacaaactgctctaatacaagacaatgaacttgattcacaaggtcaagtcacaaactcaaggaggctttgcatcattcagcaagttgaagtcaaatgtttgattaaaattcttccaatttgggcttctggtatcctctgtttcatacccaatgcacaacaaagcacctttccagtatcccaagccatgaaaatggaccttcacataggaccccactttgaaatcccttctgcatcattcagtgtagtgtccttaatcaccattggcatatggatcccatgctatgaactcttcatgcaaccatctctcgcaaaaatcaccaaaaagaagaagggctcacaagccttcaaaagatcataattggtaacatcttctcagttctcacaatgttgagtgcagggtttgtggaagggcgaagaaggggtgcaccaattcgtgttactagggttttgtgaagtgttcaccattgttggacacattgagttctacaacagcgaatcgccagagaagatgaaaagtgtaggtaactcattgcaatatcttttggttgcattctcaaactatgctggcaccttggtgaacattgtgcagaaagtgactcgaaggctagggaaaacagattggatgaacgatgacatcaacaatggaaggttggattactattacttttacttccttatagcaggattgtaaagactaaattcagaaatatggtcacatgcattccaatgtaaatccaacggataataataaaacaaacgcaaaaggaaggatcctgattctttagtaaaattatttttgcctcaattgtgattttacaacaaattctcaaacatgcctattagatcaataaaatgttaaatacttgggggaaaaaagcatgtgtcatgaacagtgctagtgtataaataatatacgatcactgcatatatataatctacaaaaacttgtttataatggtcaagcgtgattttgaaacaaggcatatatgatatggttagtccgtgctgatcagtatatatatatatggttacagaaccagtgttaaagaaaaagattatacacatcatgaataatttctcagcataatcatggaatccacaacaggttaggcaagttccccgtccttgaaaatgttttttaccttacctttttcttttcttcctggaacatatagttcaatttgaacattgtgggttagagctagctgattacttgtgtgtttgttttaacatctaggatccacatttataagaaaattcatgtaaaaaaaaatatgaagcgtgtattttagatagcattagggatctatgtctcactatatttaactatttttctatagaagtatattaataatatgtactaatttattgttattaacttatacatattaatattaatttattaatacatattaattatgacaatattatttaataaatatatattaatattaataagtatatactagtttatcattattaaattaaatatattgatattaattcattaatacatattaattatgataatattaatttatatttctatagctcattttaaaatgcaggcactcaaatcgcatatgacaaacttgaggcccaaaaatataaaaatcttgctaaaacaacgataaaagtttaagtattattctctctagatcaatattcttgatattttagcttcttgtttttgtttcaaaacttttgatgttttacatatttgaagttttaacaattattttctttcacatatacttttatttaacaattatgacttatttcacaactacttttttcgttataaatattaaacgagggccttttaaattaaatatgtagctagtgagtcacatcaaatggataaaagtacaaggtgctttaatgctcttttctctaaaataattaattgaatgattgatttaatttaatgtaataatttataaaatatgtgttatgaaaaaatataggtttaattattccgtgggtcaccaaacttttacctaattttaattagatctttgaatttttttattttaatttgggtccttgattttaagcacaattgtattaattgtgagatatttttgtaggattttaacttttacaagtcgattcaaaccaagtatttttttcataagtttcttataattgtttggctttataattttcttttataattgactcaattttactaacaaacacattccaaaagtatcattctactattgcacctcttattaggtatttttaggtatttgtggttaatttttattatgacaactagacaagagaacctaattgaaaaaatataaagtttaagaatccaattaaaagaaaaaaaagttgagagacttaattaaattatttgtagaaatataaagaccaaaaagaaataaatataattgaaagagagaaagcttacctataaaaagatactttatttttaagaatatatttatgatcatacgtgaattcaaatattaaggggatttttaccttttattgttaaaaaatattttctcttgcatattaattagtggtcaacctttcccatttttttaagaagaaccttccccatttgttgtgccaaagaagcatgatctgcatgtatccataactaattaaaggagattaggcatgcactccttccgtttcatgacaattagtgttgtcataattttttatatatataccaacaaaaattaataagttaaaatgatatttattttaatttttttacacgccacttattataaaatgaagagcatgtattgcatgcaaacttgtattttcaagttcaagtttagaatcgcaagaaattaacatcctttatcttttaatttattgctgattttaatgcatgcttttccttaatagcactcgttcgagcccacaacgtaagtgttgctgggccactttaattataagaaataatctttttttattattatttaaacgtctcctacaaagatgagaaagatataattatttaataaaagtaagtctatttccaggaaatacttattagtttgttaggaggcaagtcttataagagatacaaaaggctactttagttaaaaactagttttgattaaaactagtactaatggaggtggataaccaaagtaaggacacaaaatctttctggtccagctgctgctggagatggaattcaaaaaagtcaccacaagatgatttggattcctcaaatgcaagagcaatagagaaaaaacccagatggaaggccattccttacgttttaggtctctgtctaaacataaatttaaaatgtacatgcaatgatgcaagtgtataatacttaataatcatgatccatttgttatcacaagttgagctaataactatacttacgatttgcaggaaatgagacaattaagaggacagcaacatttgacatgacagcaaatttcatgtgtatttggtgaaagtcttcaacttgggtcaggttggtgcctcaaatattactgggatatggagtggagtgagcaattgcatgccccttattggtgctgctgttgttgattcctatctgggaaaagtcagaaccattgctatgtcatcttttggaacacttgtgggatgttctcatcgatcagctattgtcaaaacacacattacatggctaattgatgaattaaactttaccagtgtttggtaggaaaattcttttatgtttctcactaagtttaaaaattacatttccgaaaattattttttaattaagtttttctctaaaaaaaatttatgggagggaattggaattggaatccaagattcccacgaaggtagaatttcttttaacaattatgtctcttatttcctagaatattttaagcataccaaacatatttaatttagacatttctaagaaatatcaatcttatgaaatttaatacccttattaatacagatcgaaaatttatattcgcatttttttctccttcatgattaattatcagttgcaattaactttttttaaagaatgaaaccaattaatatctatgttgaattaatgcaatctcaattttggatgtgcaagtcaaattttatttgtagacaatgcttttaaacctaaaatcctcaatatatcgtaaaaaaaaaaacctcaatatataactgtgtcttttttgaacaaaaggaaacaatataagatatctaaatattataaatttatgatgaatttcaattaattttttattattttatcagccaaataaagatatgtttaatagaaggtacaaggatacccaactcgtacaaaacagtctaatgatccatttaaatcccaatgtaacaatccgattaaactctcatatgcagtaactagtgaaatttaattcaattggttaaatatgtgcataacttgttgtaagcattcaattggttaaatatgtccatccccgaattctattaataaaaaaaacatctgcagtgcaaaaccttacaaattcaattataccactaagtgaccatcaggccttcattacaagttacaacacaacaaaaaaatcagatatatatagagtaaatgagtacttctgcgatagtccaaattaactggtgctgcatttatcagaaacagtgcacatgtacattgcgctgattacttgatgttggtgacagacctcatgatgcatataattttggttccactgaccattaattcaaatgtttggctccactgaccattaattcatagaatgagcatcaaaatccttctacctttgactttaaccgcaactatgatctcaatttaattaactatgttacctgttcaaccctcaaactgtcattatatattgaagataatattaatagcattccttaatttgtagccacggggaccaaatagttgctagccaaactacccaccaatctctcctctttttttttttcctgcaagcttgccactatgttgcgaaaagtgggatacacaatgttttggtaattccaattcaactcgtttaaaattgtaaagtttactcccgttagaaattttttattccaataattaatttaaactaatattataaaataattatattaactaattattattagtagattttattttatgtgatcaaattaagtgagtatgctatacaactaaatcaaatgatatgaacttaaataagtatgttagtattgacttattagaggataatgagaactctattaggttaacacgctataagaagattatgatccccaatatatatcgagtcgtcacacacatagtttattttctccccatttaaagagttacgaaagtcctattaaagaataaagaggttgcggttgaggaataatcatgaaatcatcggttacactattagccgattatccatagtctctacagcatcccgtaacaaatcctaagagcgcatagatcagaaatcacctacggattcagattctgttgtgtatgtttgatcaatcattatagatacaggtattcctaaaacttttcttgataatctctcctaatgtattcctagtgattattgatattttataaagatcccctaaaatttcaacaaatgatattagagccaccattagtgttagattattgagacttgttggaattttaggagatccttataacatgtaatttcttattctcttttttttttctctagaaaaaaaatgcaatattcttaattctcaagtgactcccctcaaactcaatgcaactttgggattcaaataatatgagtaatttaaatcatagtagtaacaacaataacaattaaagaagagaacaataaacatacaatgcacaaataatctttatggtaaatttcaagacccaaacaagatacttataattagtgcaccattaatcctcaatttttggattgaaaaaaactaactgcaagtaatactcttaacacattgatcaaacatagataataagtcctgtcaaacaaaggttgtctttgaactctccattgctcacatgaaaaacttatatgatgattactccagtcaaataatgattatgtttaaaattttcattattcacatgaaatatcacactatttataatcattacatgtttaccatcgtaactatgtaattattttatcaaattgtatcttcttttgggccgaacacaactcgtatgaataatttcatatgaaacattaatgtaaattcaatcaactcaacttacataatagatgttactttgataagatgtttcaatcaatttaaccaaaaatactaaacaatttaatataatacaactctcacgtataatataattgaagttatataaaaacctctaactaaaggttgattgataaaaatatagaacactttcaaatactaaaatagagttgttctatatataacatattctttatatgatcgagattgttttacacttgactggtgaacttactagtcaaattatatagtttcatatcatatagaaaatcaaagacagactagtaagtaactttgattttaaccccctacttgacacagaacttgctattttgactagcatgtttcatgtcatgtgattagtgttaaactcacactagtttgatgcatgccacatatattttcagaagaattaaaaataggactgtctcttaagtgggtcttgcaagtcaaaatatcgagtcccatgcatgttgcaagtaatgtattgcttttatagaaaataataaaataatataattaaaaacaattgaaacttttacgtacacttgatattgggtatggcttgagccttattaaatggttaaatatcaagtccaacatgtctcgaatagttgtaaaagattcgttatatagaaccacttaatgagataaaagcttaatttgatgatttttattatactatttaataatttcttatttctataaaatatgaaattcacttcacatgtcatatagaagtcagtttcaattttttttttaaaaaaaatatgtgacatcatagttgctaattaatcaaaataaaaagcaagtttgactttaaccgcacgatattaaactagttaatgtgactagcaaatggatctcgacaatggttagaacaacccatgtcagtaatatgtttcggaataactctattttggtatttagtttttaaacctgttacagtctgctcaatcatgcatattcataaataacatggataacacaatgattacaacattcaatcgtaacttcaattcagtaaaaatcaaaacagaaaatacttttctttttctttgagttcaatccttacatatatgcaacctatataatctacacatgcaacaagtggccgttaaagaaagatagtgacactggcaacaggtttaaacgtaggtgcatggtccccacagtccactaagcatagcaaactccgcactcaatccatgtacatttcgctcgtgcatgatcagtcggtatgctaaacactagcacacgcttagtcttttttcttacacaaactgaatacgtactaccatgctacggtgcataatcattatatacgtatgcgatacaccattcaatcattgagcattatataaataagtgtcttggggtccttagttccaacctaccaaatgcctaacatatttatggaaccatagagagactgttagctatagcaaaacaaacagtggagaaattttgattattgttgtgagataatgtctgcttcagaggataatggaaaaagattctctcactcttcttggtcacttctatgctgtagaagtggcatctcttcaacttcagcagcagaaagagaaaaaaacagtgaagaactaagcagaaatagttcaagatcatcatccaataagaagccagaaggatggaaggccatgccttttattttaggtcttattctatttttatttccttccgtataatcatgccatcattctttcacaaaggaatggtcaattacaaatactctatattatttctttttctagataacttactgttttggagttaatgttacaggcaatgaaacttttgagaggttagcagcgtttggtttgtttgctaactttatggtgtatttaacaagagagtttcatttggaccaagtttatgcttcaaacattctcaacatatggagtggtatcaccaactttttccctttgattggtgccttcatttctgatgcctatgttggtcgcttccggactatagcttttgcttccttttcttctctactggtacagatttctttcaaactctctagatttatttagacttggtagaattaatagtctgagtgaactgggccactatagcttcattatactgtaactttttttttcttttttctttttattatggccacttaatttatttgctgtgacttccggctttggagaacaccattgataatttgctgtaacataacacctagagttgttcatgttcatgatttttacatcctaagttctatgtttttgttttgaataatgatacagaaacaatcatcaatcactccaaacatcacattagcattcatcatttgatcatctctatctttctatcactttataccgccttttatattcatttttttctttctatttttatctctttatcttattaggttaggtgtgaaatggatttgtgtgccccaaattgatcatttttttgtcttttattacgttaatcactaggagcggctgccattttaatttaataaaaaaataatcacttttttttctttaatgatgacattaatatgaaatcgtttagttgaaagtgatgattaaattttgtcacaaaccttaagtgcatataagataagtatttttttaaatataatttattttaaactcaaaaatcaattaagattcaaatcttaaatcaaagaaataagctactatcactcaaccatttacttgtaatcatacattcctccctcattgcattactgtataactgtatatattatatttaaagaaattgtttttctaaattgcaccaaaatattacaacaaagggagaggtacggagaaaatatagaaagcatcaaataaaacttttaattttaatgtgatgaatagcgatgcacaaagaaaaaataacattaatgtagaaaagtgatgtattgatttgttatataaataatatatatttaatttaattttaaattgtaataaattaaaataagaatatttatttatgcaataaaactgaaatttcaaaatcagacacttcgtagagtcactggaaccgtggatggaaacataaaaagagataaaagagacatgacaatgcaattgcacaacttatggattatattttaaggctttacaataatataatagtgaatagtcatgcacgagttgtacgtgtgtgtgtatttttttacctaagattttttttgcgtcattaacatatataccaaatgcatatatgattgaaaaattgtttatgaattatttaaaaatagaaatattcatcatatttactgggattcataataacttttaaaaaactctagtttaatatatgtgtttatatattatattaatcaatgtattatattagctggcttaaactcaaaaagtggttgaccttaataaagataaacttacatttctactttatttctttactctctgttaacaaaaccgaatactatatataatcatgcatgtcctgtttcacgtggtctagtagtgtcgtcatattttataattcaacgtgataatggacatgcaattttctaatagagagattaaattagagtccatgtggacttaattcaataatagatatgaagcaaagatagcaatttcaatatattttgagcaaggggaaactaattaagttgaattagtgggttgttctaaatggaaaatcagtgtttcgtaaaaaaaaaaaatatatatatatatatatatatatatatatatatatatatatatatatatatatatatatatatatatatatatatcaaagataattataaataattgtctatcatcaaaaagaataaaatccactctcgcctgtaactcagactaatgcaaccacctttctcctttcacatacatgataaatcatttcatagatatgatgcgtaacgtcacatcaaaagaatcttactgtcttttgtctttgacttttatttttgggtggttattcgataaacaatattcaaaattctcctactacatcttttaattatttatttttatacgaaaagaattaaatatatttgatatttttgaaatagtaaatatatttatttttttcgttcaatactttattacaagaaagcaagaaaatttaaagaatgatcaatagtaaaaagatatagcaatattagtatattactcttatagtcttattccatacacataggcacataactatataattgaatttcctattgaaattttttgtgacagggtatggtgatggtgactttaacagcatggttaccagagttgcatcctccaccatgcactcctcagcaacaagcattgaaccaatgtgttaaagctagcacacctcaccaaggtgctctacttacgggactttgccttttaagcataggctctgctggcataaggccatgtagcatcccatttggtgtggaccaatttgaccccaccacagatgaaggaaaaaaaggtatcaatagcttctttaattggtactacaccactttcacggtggtgttgttgatcactcaaacagtggttgtgtatatccaagactccgttagctggaagataggttttgccataccaacagtgtgtatgttctgctctatcatcatgttctttgtgggtacaaggatctacgtgcatgtgaagccagaaggaagcattttcacgagtattgcacaagttctagtggctgcttatagaaaacggaaagttgagctaccaagtgagaagcatgttgatggggttttctatgatcctccacttactgggacacaagttttttcaaagctaccactgaccaaccaatttaggttagtaagatggatatctctttcatttaggtggagtatccagtttgcatttgcaataactttgttatatactaccattatgggtgcgtgtgttattatcttatatcattgaccaataattaaggttggtaccaataatatgcatagtagttggtttaaacagtgctaaattcaattttttttttaagtaaaaggaatataattgagagaaaaaaatcactaaaaaagattagtcaaattttccgtcaaaattagttatcaacaaacaaatgatatatggtgacctaaaaaaataatatattatatattatttatgatttcttctagaacttggattcaacttttggaattattttagtattttatggggggaaatgctagaaagactattatattcaaatgttttaactaacatgggctgatttatattttgataggtgtttgaataaagcagctgtaataatggagggggagcaaaaccctgatgggagtagagcaaataagtggaaagttgtcagcatccaacaagtggaagatgtgaagtgcttggcaaggattttcccaatttgggctgcagggatcctaggatttacttccatggcacaacaaggaacatttactgtgtcacaagccttgaaaatggacagacatcttggagcaaaattccaaatcccagctggttcccttggggtcatatcattcatcaccgtaggtgtgtgggttccattctatgacagaatcatggtgccaacactaaggagaatcactaagcatgagggggggatcacactcctgcagagaattggaattggcatggtgttctccatcttatccatggttgctgctgcattggtggaaaaagtgcgaagagatttggcaaatgcaaatccaagcccacttggaattgcccccatgtcagtcctgtggctggttccacaactagtcctgatgggtctgtgtgaggcattcaatgtgattggacaaattgagtttttcaacaggcaattccctgagcacatgagaagcattgccaatgcattgttcttttgctcttatgctggggctaactatgttagcagtgcactagtcaccactgttcatcatgtcaccagaacacatagccatccagattggttgacaaatgacataaatgctggaaggcttgattacttttactatctggtagcagggattggagtcctcaacttggtttattttctgattgtggctcaaagatatcattacaagggaagtggtgacctccaagatacaactcaagatgtggagttagcttcacaaggagagttagattactatagtgctaagtatgaaaattctgcataaaaataagtggaagaaaaaaataaatatatatatatatatatatatatgtctatcttctcttttgaaagttgttcaatgcaattagtgtgtttgaaaacatgttgagaagtaaaaatcacgtttcggatgtgataatttagcgcatgtttggtttcaattattcgacacaataactcacgataaaatagaagtagttcatgaaagcttatctgtcttaaaaaaaaaataggtgaaaaaacaaagatatgcatgtcttgaacgtgaattataattattagtagtttttaaaatgatgctgaagatgtgaaaaatctcttttgagatgttgaaccaaataaggttgaatcgttgagttttctactcttctacggatatatataatatcatctcattttattttcatacatgataatgctatttctatgtaattttttatataacaaacttcacaatttagaaagaaatacagagagaaaacagagtaaatgtcaatatatatgccatacgaaagaagatatcagtagaaagataaaaagaatttttttataaaaaatattataaatataacactgtcgtatcataagacaagaaatcagcaagcttccactgaaagttcttgctgttgcgatgccggcatgccctcctcattaaatgaagcaaaatgtacgtggaaagccaattctctcgttaaattatcaaatttgatgcgtattattgcaatgtatcgttcaacaattgatgatgatttagtatagtattttttaaattattaagtaaacaagatgcatgcgagggtaagtgcgcaaggcacataataattaaatgaatggagtaatattatatcttcttaggttaagtgcgccaggcaaatcataattttcttaataatgttttttattttattaaaaagatatcaaataaaaaagtgaatacaattaatataaaaggattcaattacatacttgaaatacaattaatataaaataatagttggaatgtaaaaaaaaatggtggttatcaatattttatttaataattagaacaaaatacaaaatatataatgatgtttattggaagatttattcaaattaattattttattaaactttttagacgaaatagtggtcatcattatttttcttaggaaaaacttcaatttactcccttcaacttaggacaatatgcacatttatctctacattttaaaaatatacaatataatattatacatttttaaagaatttaattttcatatatggataatacaacaaaatttatattatcaactaattaaaacttatcataaatgtgacttttaaaaaattattaatatcttatatttacatactataaattcattctaattatattcaaatttaaaatgtagttttagtatttttgtgtaacatttgtaaaatcaccatactcaaagtctcaactctcaaacaatatatgataattttttgtatcaagtttttttaaggcaaatgtttatcattgtttgtatattgtgtttggtaaagagaaaagaaaaaaatgaaagtgtgaaaaaaaaaatagaatgaaaagaagtgaaatagaataaaaagagaattaaaagtaaagttgtttgattgaagtgaaaaacaacaaaaaaagataaaatatttagtatataagaaaaaaaattaatcattaacgcaattctcattttatcccttatttaaaatatatttatccagattttttttctctatgaaaacattttttaaagaaagtaagacataattgattatatgcctttggtggcatattaacttacaatgtttgtagtcactaatcaaagagtacttctatcatatacgtcagtaatcaataatgtcttttgggagtcacaagcaaaggggaaaaaattaggactaaattaataaaataatacgttattgatacttctcacactcaagcattatttatttcactctttttttttctctattttgcatggaaacattgtagtgtagacctcaccatttttttaaaactttcataccactttcatgtctattaagcaccttcaactctcctcgctctttccatccacttttacctttcgtgctttcactagcccctgccaaacacaatattagaatactagttaagaaattgaacatataatttattttattaaaaagtgttattaaattattttgcaaaaaagaaagttatatatatatatatatatatatatatatatatattcagaatattttgtactttacaactgttttccttcattttctctgaaaagataaaggaacagataaacagtagataccacgatattgttaatctttccttccctcttttatactataagaacccaaggaaagaataaaattgggatattttctttcccttccctcgtagatcggccattccacaaaccaaaaatgtgtaagtgtccctgcccttataataatatatttagaattttagaactcgttataaatatttgcaaaaacaaatttctttgaataaaggtaataggagaacgttaaggtaaaggatgataacaattattcagatggggaaatcgaactgttcaaagttcagatccttttaaccaattttcacaacccacgttatggtacgaacatcactaaagggtcacgtttgccaccttcactcatttttttgctttcggcctgaatggtcaatatcaaagctaacaaaattaaaacattatttatttcagcaacaggcaacttctgttctggatacaatgtaccagctgtcggctgtctgtgtgtaaattatggtgaccagccagcgacaacgcaacattaaaaacttgggaaaaagaacgtgcttgtctatgactctgtaaaaaaaatacattgggagaacaaggatttggtttctatgttgttactttgtttttttttttaagtcatataatttttaatattaaatgtcatcattaaatattatgtattattattttaatgggccaacataaaaataatatggaaagtgatagtagagaaactaaaaaaatctgaaaaagacagatagaagagcttaattaatgtgttttgggttagcatttgtaaatttaatcttgaattaacttgattttgtaaaattcatttaagataaaaataaaattcaacaaaattgatttgagaagaataatgttgtttggataattttaattaaaacctgtctagaaaaataagtacgtagaggctaaattttatattattctactaaagagttgttagagatatcaatgtgatgaaatataaatgtggttggtagacagaccccattatataagtggttaatcaaattctcatgggtgaagattagtaaacaatattttacactaatatcgtaataactaaatttaaaatgaaaattgatagactctatagtaaaagtaacaaattcttttatttttttatccgagcaaatatttttttttctattaatgggtgtttgctttcctattagaaccacacaaaagttgtaaaggaaagggcttaaaatgataccaatatctactcaaacgcttatttgattgaacaatgcattaagttattataaattttttaatatttatctttgattgatcaattttttttatatatacttcataatgtatatgtaaacatgcaattacttagtataaaaaagaaaagaatttaatagagatgcatagtgaatatgtaagagtttttgctaacacaaatcttcaattatcatttgtatttgtatgacttaattttaaaatatttgcaataaaagataacaattttgtaattgtgggaatccaagatgacataggaaaattgcttgtgacttcccttttgcaatcatccgtaccaaatcattccattttagataggaacatcatattattattcttgaatccgaggagatcaaacaaaattaagatacatatatataaccacacacgagctaggcatgcaagagccagctagtcaacccacactgatcaaatcttagaaagaagattatacctacttttccctcacgaatatgtccacttcacgggatggtgaatattgtatgtagaaccatggatcatgcaattgaagactcgcaaacacagccatccttgtgataattgttatagatgtggtgtacttgagcacttctgtttctaaatgtgggagacatggtgggaaaggtgtccaaaatttctgccttttcatcacttatatcagaactccactaacaacgacgcataaagaaagaagcttgcactgttgcacaccaaccaaatatatgtttttttttaatccacaaatattaatgtcttaaccaccaaatcaccttactactccaacaaatatgtggtatagacgtatagttgatatgtaactatttcctagctttaagtatattggttacatattcaatcatcaagtttgtatataaaaaaaagaagaatatttgatagaagaaatcatctttttgaatgaatttttgtattttgaagaattaatttttggctatcaacaatcgataccttggacaacaaaaataaaaataaaaaagcagccgcagcagcatttacttgaatagctaagtttggagataccactataggatgaaagagaatttgttgcgatatgtgctgatgtcgtcatgggactacatcattgagtttgtgaaagatgatcttcacaacttatgatgggatataactcttttggtatgaatagtttatctctctgagtttttgtttggactattgaatttatgttcttaattttcaagaaaggatattggttggaattgattaaaactttagtattgactaaatttgattcgatggagagataaaccagtgatttttttcattgtgcaagcaagattggtaacttggttaaaaattataacatgtaattaaaggagaatgaattttttagtaagaggggttaattttttattttcaaaattatcaaatgggatagattttaaacaattacctatttaagggcaagtcgtgaatatcggaatacgaacttgtttcaaaagtcgtgagttcatcgtcgactgaaattgtactttgcctcgaaacttctgttacaaaaattaaaaacaaaataaaattaagaagctagtcatacctatatttacgacttttgcttacaaaattgtattcttatatatgacttaccactgaacaataattattcaaaatctacccatatttgataattttgaaagaaaaaaaaaatactctctcttggtaaaaactaaattttgacgcatataatcagtataatattcagctatgtgatgataacttttttgaagctaaaatcaactatcttttttttttacgtaaactaaaatgaactatctttttccataaatatgaacacatgcatgtaattttgacgcatagttgatgataattacaaattttctacataagctaaaatgaactatcttttttttctcaattatttccttcaactgaaactaaaatgagctattagttagttaactattagctaattcgtagatattattttattttttaaagaaattatatgaaagaatttctataaattaactaatagaaattaattttagctaattaataaaaaagttaatttcaatttttttttcttgaaagtgtttctaaagaagctcttgccaaacaggcctgaattacttatcaggcctaacaccatcaaagaacaattaaccaaagtaacaaaaaaaaaaagagccattaacaacagtggttaacccgcaggaaaaaaaaagggggtaagaataatgaaactttcctagatctccttggatgaattagaggaaataaattaagtctcggtcatattgactacacataatcaatttatgctttattttttgggtacataatttatgcttctttaactcatttctatttctccaaatgacaggtcttatacttgactacaaagagctttcagttatgatggtaagagaagaggaggaagaggaatgaaaaaagaggagcatatgggtccagtacttaaaattagctattgttaagaatatgttaatttaatatttttttaagaaggaactatcatttttttagggaaaggaactatatatttaatcttagattttaacaactattggccattttgatccctgattttaatgtacatcagtcaaatttgtctcttattcatgtccaatatgtagtcggtgtgaagaaatggatgttgctttttcggggtagtcaagtggtaaattaggaggaagtataagtgaacttatttgcaagtggcgaaatgatgattaatcgacacatctcgagtcaatctttttttttttttttttcacttttcacacatttcactcacgtttttcttggtgtacaattcatgggctgttgggtatgattacttcatccaaaagtataaaaggtattgatacatcaaattattttcaaaaattattattactaatcaattatatgatatcttcaatgctataaaaaaattggtaaatactataagcattgctatttttactgtcatttaatcataaactatagtataataaatttattaaattttataataaatatagtaaaaatcatattaataataaatttttttgttagttattacagacttcttgtgcataaaaattaacttctataaaaaaagaaaatttagttaataacttttatgattggcatttaattgttcatttcacatactttttttagcacaaaaaactcattatttcatcatgagttagaggttggaaaggagatatcattgctcacgaatcatgatggtgcaaattaatattgataaaattatatgatttgaggggctcagtcttggaaaggagagggactctatttgtgccaaattcctttgctactccactatgctgaggattcttatgtgggatatatttcatcctcaaaatgtgggatatatttcatcatttaacatagctaaaagaatttcaactacagcagattctggccagtttactcttcaatgggttgggtcaagctcatgtgcaaaatgaaatgaaaaactaagcccaaacaccttggttgtctcaattgatctactgtgtattggatatttaggttccattattattaggagacctttgttattgacactacctttttttctattgcacccccttctttagtattttttattttaacataaataccctcacaaaaatgcatttctgttttctattgcacaaaatgaaaaaatatttccattttgtattggggtgtgtgttcacagtatgaaatgaaaatgcatttttgtttcgtattatggcaagataaaaaacaaacgtatttctgtttacataatataaaatggaaacatttttctattttgtattttgacaagaggcaaaatggaaatacattttcattttgtattgaaaatctaaggcccctaatagcaatatgtgtcatcctatactaaaaaacaattctaaaaatatcaaaacaaacaagatcaatatctgttgaatataaaattaataagtttggtaataatgagtttttgttaaataatattattacaattagtcttcagtaatattaacagcattgccatttttttctaattacaaactaagtgttaaaatgttgtatacgacctaggtatgaaatttcccatgagcgagagcgagactcttcactacattatctggtcttttacttatttgaactgtttttctatttatccaatatttttataaaatgtaatggagaaaatataactcaatattttgaatgaccattgtgtttataatattgagaaacatttactttagaattttaatatttattctatgacagaacccgagaaatgataatatgtatattagttcctataaacaataaaatagaaagagaaacaaatttaatgtggttcaacatgtttttcttacgtcatcaagtggaacatgtaagcaaataatcactatctcaaataagctaacaaattttatagataaacttgaaaaaactctccccattataaattttcttgataaacttaaaaaacactattatcgcataagtctttagttgaatgatactttttctcttcacaaggatcccattctataatgatggtgaataacttcattcataaatgtaatttaatagacttttattgtttcacctctccatttatctttttattagactaatggagtttctcgagagttagatatattccattacatcttgaaatacatctcttaactctttttttttatgtgcttaattcttcgttcacttatattaatatttaaaaatttggattaattttccaatatttcataaatatgaactagagagataagaaacctatatcaatgttgtcaattttcctttagtataaaaatttcatgtttactaaatatatattttcattttatacaatataatatatattataatttttctaatcaactaagattgacctaatgataaagaattttataattagcatgagactttaggtttaaaccacattatcaccattatataaaagaaattacatttttttatgtgattgttatgaaatatttatcgattttattaataattaatctttgtggtaaaatttaagtgatcatctttagtaagatattttctctcaaaattcaaactcaataccttacttaagctatttgatcctaggtccacttttacttgaataaaatgcttcttggtttatagtttttccactttgagattaaaaaaagaaaatattgccactcctcgaatctcattaatttagaaattcaagaatttattttcacaaataattgaattgaatttcttaaatgaaaatcaaatcaaaactatgttggataaactagttagaatctgagaaactatttagtagctaaaagttaaaaaattagtttattaaattataagtatttggtaaaattaattgttgaagtaattgaaaagtataaaataatagaaaataataaaatcatgatttattttaaaaagctaataggaaaaatgaataaatatattaagaataaaagtgattttttttaaattaaaagttaaaaattagcattttaaaaaatactacttcaaacaatatttaaaaaaatattaaaaattactaaaaaattattaaaataaaatatttattaaattattaaacaaattttttaattaataaaataaattaaaaactaactaaaataacataatcgaaattgtatttttagcaagtgaataataccctagttctctttgatatccataggatgatgatccattctacccagctggcacaaacgatgctgtgtccatgtctaattggatcaaaaaatcccacaagtccaaggaaggaagccattcgaagctgtccacagaaccgacaagttcggcccactcggtttcctccccatttttctaaacacacaaaaatcaaaacctcaaaccgaacactctcattataaactctcccaaacccaaactacactctccacacacacacacacactcaccgccgtatcgttcacactgaaccaatccaaaccccactctctctctctccgccgcaaacgacccttctccggggcggcgccaccgtacaacccccgatttaactaaaggagcaacagaaggagctgcttggttacaatggcggccaccgcaagcaacaatgacgtcgccgccgccaacgacggtcccgtgatgagccttatcaacaagcgcctccgcgctctccgcaagaagctgaaccgcatcctcgccatggaagaggccgtcaccttgggcaagcccttgaacaaggagcaggaagaggttctacgctccaaaccctccgtcctcgccctcatcgatgagctcgataagctccggcaacctctcgccaccgctctctccgaagagctccaaatcaacggcacgtcttctcaaaaccctcgccacgagaccgagaccgaaaacgaaaccctagctgagagctccggctcgactgagccgaactcgaactcgaggaacgacgtcgttgtggaggacctgcttaatttgctctattttggttcacttttcgatgtgaagagtgactttgcgtccacgatgcttaccaggacgcacgagcgtggctgctgcttgacctacgactacgtcaccgacgatgccaccgatctgcttggcgagaaggacttggattcgatctccgcactgagagggttgctcgtttcgcggcccgcggattcaagcttttcgcacaagaacgcgctgcaccgctgcgtggaacacgccaagctgtggcttgctaagtcggagcagcccattgggcctgatgctgatgttacttgtatggttctgttgaattgctctttttttctttcgtgttgagttgtttttttacttgttaactttttattgagtgtttttttgtttttttttggtttttggtttcttttttctgtagatgctgcattaagggagaagttgaacaagattatgtcttcggagtactttactacgacacctgagatgaaggctccggttgaagttgctgcggcagctgctgggggaaattacgtttccttccatgtgccggtgcatgggtctgtggttccggttgaagtggagcagcctgtttttcagtctcaggagaaggtataatttatagtgcttgttggattggttgtttttgaaaagttagtgtttggaatgcgttgcttgttttgaattggtaaaatgggaattcagctgagttaagttcatggcttgaatgctgttatgtctttgttggaatgaagtttaaattttttggactgctttgggactgaagtaccgtagatgtcaacattactttatttggttggataaaatgttgttgggaagtgatagaacttttgttgagaggtgatttctgtttatggttgcacaggtaagaggggagggatgtgagaaggatgtttgctgatttgtttgttgtaattcttctgctgatacatggggttagggaaaaattaaattagaatctcattgtgtttcttagttttgaagaaaatcattatatttcttctccggtgttactgctttatgcagtggacttgaagtgtatttattaatttatatagatgaataagcatggttaacctcattatactttctttgttatgcaacctggatgaatgtagtattgatgaagtcgtgcttaagaatatgctctagatttacatgtcccagtgacttaattgaagttggcaagttactcatttgcttcggctacagctgaaatgctataggaggagggtatctgtaatatactgtactactgtgcttaagctataaaggggcatgagacctataaataatttgttttctatcatgaatcatgagttataaaaaatatagaattatgcaatatatatttgtttaatcatggttatcaaactcgggagactaattaactcgtatgagttgacgagtctacaggcacggtcttgtttaacttggtggcaaattactttttgtgtgtatttgtagcagactcgcaatcttgaggctgaacaagtttgttgggtcaatttttaatccaaaacacatgtcgttttggttgtttttagtgcatttagggacatggttatgtgacctttagcgttgctggttatggcgttgcaacctttgttgtgggtaaggcactgtgacctttgctgttgtggacagcctttgtgacctcccactcctctgtgttctcttgtctgtttgtggcagtgctagctaaaagcacctgatgggtcgggtcatagtcagggtttctttctttatctcttgtctgttttgtattgttgggcctctgtttgagcccaacaggtatttttttgtttttttatgaaaacatagcatataatatataatcaactaaagaataataataatagtaataataataaatataagggtattataaaagagaaaaaagattatgcgctgacaatgtaaaaagttttatgcagtcatccaattacaactcaccatgtatgataagtttgttgacttttaaaataattatgtaaaatgatgaaatgtgattggatgacggtgttttacaccgtcagtggataggcattaaactcattataaaaaataaaaaaactatttaaagcataatatataacagtgatataataaattaaataataacagtgatgaaaactaaataaagcataatataataagttaaaataagtgttttattatattatttatatgaagttgactattacaagtttaaagttgagtttacagagctgcaccaagtttatgtaaaatctggagtttgacaaccttgtgtgtaatcttaatgcacaaagtgcaagatagagttatcccctgcacttgaagtgttaggagaaaccttttagtagctaaagtaccctgtacacaatacacatgcatgtcttcaagtagattgttatattttgttctacacagttaatctgcaatatgtacaaaacatcatgttgtacatagttatcccactaggttctgcttctagacgtgttctacacatacacgtcttccattattattatattattattgttgttgttgttattattaatgtgtgcaaacaatgataaaatatatgatgtttagaaccattcttgatatagaagaatgtacaagcagaggttctgtttcttacagatggtatttcatgtgggcatgtctaaatatttccaatgtttttttataatttttctccaatatgctgggaacaaccattttggagtgatttttctagattatatttattttttctgttaggttgaaatgaagagacccttcttcacgacatgttttgagaaattaaatctatatctctgaaagttgagtctttggttataggatgtgtatgcaagttctatgtcagaataggccttgtctatcttctttaaataagaaggaatgtcatactccctctggtcttgattataagcaaaaaaagacatacttcacagttattaagaaaattagttaatttcatcaaatggtgtcatttccaattaaaaaataaacattttccctaaattatccttcattggaacttgatatcaatcataaaaaaaagtctttggccttattaaatgaagggtattttgtggatagtttcattaaataaggtataggtaattgggatttgtttatatttgagacaaaaaaaaaagaagcaatttttgttgcttatatttgagaccggagagagtatagtttatgggagaattggtagtgcattgataactctcctgaccatgtcttctagaatattattgtcattgttgacgttgtatagtgtgttgtacttgttctcttcaattgaagtcaaaatgttttttactgataagtccttggtttcaggcttcgagttatcaactgttgcatttccctattctaagtggcgagttagtgtttatatggttaaatttcctgtttctgtggggttagcgaaatgatataatataccagtgacatggtctgtctttttaagtatgtggctgtctcaaataccagatggagtgctacctgggtgtgtccaaagtgatgatagagggcatgagagggaaattctccattccattgtctgtgtagtggtgtattggtgttccatcccctggccaacataggtggctgataaacacttgtaacttactaggaaataagttttccttatcttttgaagttctacttctactatgaaataagttttccttatcttcgaaggtctaacaagtgtgtcgtgtactatgcatattaggccaaaaattttaagatcactgttattctggtgacaagtgtgcaaatatctatttatatttactgttgaactgttatttgaattgaatcctgatccagtgtaatagtggtgcgcaaaattaaatgtatgcctataattttcataaacagactaacactcatacaagaaagttgattgatctatgtagtggacacccgatagtgtaacgaggttttgtcgtcattgtttttattttgaatacttgcacaacattctagaagcacatatggttgctatggcgactgattgttttttctcccattttgtcctctttctatttacacatacggatatatctgtgaagtatagcttgacattttttataattaacaatcattgttataaactataagtctggtgctcttggtgatgggaaccctaaaatattttggaagaatgaagaataactctgtttcagtcatgaatttatgatgagagcacacaaagtactcctttccttacaagggcaacaacattacaactaagaaatctcagttaacaaaattattattctgatctgcccagtgctgtaaactttttacctatttaaactggatagactggtggaaggcctatgtctttgaaatttgtagtatatggtagaagaaataagaaataggctagtagttttttgtatctgtgctgaacagttatatgtggtttatccgacagttatttgtattaattgtggattggaaaattattgtgtaacagttgttccccttctaagtgaaccctcatgtgctgagtgtttggaccgaaaaatctggtcactaaaccagattgttttagttgtacaatactgttttgcgtttctaatctctgagtcagccataaactctatgtcctcctaaattcccttaccactgttgtaaccaccttaactaactatcttatggaataaacacaccaaatcctgcatgaactttctactgagtcttttccacgtgcctaacaacctctagattttattctttaaactttaaaggaggttcccaacacctaggtcttgccattatttggagatcaattccaaagttatggtctctctgttgcaagtattcttaggaatgatgacaatattttcaccttggcttttgatcaattccaaagttatggctccttgacaacttcacaatatcgatatttcataatcaaagttcgtgcaaatactgtaacattcaattacctagcactaactagtgtgataactttctttaagctgtgtaaaatgtggcaatgtaaaacattatttgtttctattatcccggatttttttaaagtagtctttttttctttcctttctttttctttggtgtaagatatctatggtgcttcacttgttctgtgatatgaattctacagatacacttcaattctcactgcttgtcgcttttggtaaagaatattgtttttttcatctttgaatcaagccaaaataaatttggatactttatactattagcttataagttccatatgcttttattaggatgaaggaactgcaattcaaggacatggatctgaagaagatccctctgatcctgagggagagcttctgaaggtttgtataattttggctagatattgtactgacattgaagttgatcagatgctaaaggttttattattttttctgcaggatgaagtagaagcagaagcagaaaatgcaggtgaagtggtgtcagttcaacatgaacagacgaaccagcaagtggatctagagtataatgaacgagatgtagaggcaaaggaccagcagtcataccccaggaggggttatcagaaccatagaggtggtcgtggtggaggtggtcgcaggggttactcaaatggtcgtggaggtcgaagtggtggcagaggaggctaccaaaatgggcgcaaccaatattatgatcaacctggaaattattatccaaggaacaactattataacaacagaggaagaggtggcagaggtggtggctattacaacaaccatggtgctggtggtcaagttaatcacgtcgcaggtgatgtgggggtgcaatcatgataagttatgagttgtttatagtggttattactgtcactagttggtggtgaaccattttttattcgcctggcatgaaaacatgttttgaacaattttgtttgacacttgaaagttcaaacgtctagactcctccactattttgtagtccagtggctagtgtggacctttgtccgaaatctcacatgaagaaactaaactgtatgcgaatatctaatgttctggagactggaatgttgctcttgttttctctttctgcaatagccgccaaccagttggcgcttttgtcaccccttgtttaggaaggtagatactttcgtaaggcacaaattgcaaaagcagtgtctcgttggaaaaaatattacagttgcattctctgattggtttttatttctcctcgagccataacttttcactgcactaagggcacatgacatcaacttatgcatatttacaagctttattacaaagtatcctttaagttaactttcaggtggatattaaaataaataaactaatgtcaaataaataaagtagcatttgatctaattttactgagtttttcttttttaagtattcttttttctaactgattggcataatcaaaagctctaatttttaaattttcattcataagatttttttaattgtgcctgattcaatttaaaaaaggttaatcacaattttgaagaatagatcgaactattcaacctaagtcacatcttcccctaacttttgtttcacccgaatttggtatctgcggcgtatcaatatcttgaaaattttctccaatttcataaaaaaaagataataggtgaggatttcttgtcttcaatattatcactatcatactaatgactggaattaggtcctttgatacaacaaaagaactccaacaaaagtacaaatatatataatcctttttacacgcagatcttcgtcactgattgactcggactgaactttttttttttttgtttttaaataattttctttttcttgcgataaaaaaattaacttttgtaaacaatcttctccgtttgtgacattcaaatgactcggctgcatcttcaattccttccaacttttaagtcagatcaaaatattggtgtttgttaaacaacatttcatgatagtgatgcatgctgatcaacctatccgatcaaaataaatttgttggcagaaattttgttaagactcagaaaatatacccaaaacgctgattcaataaacattgatgcattaatcaaaactttcgtggtggtagttgtgggtaatgatagctctataaccattcgtggtaacactatctatcattactcattacttgagttatatttccacactatatcatcaaattaatgcataacaatatgttagatagctctataaatctatatatgttattgtagatttatcacaactccaaacttcaaattttacttgtccttaagcaaaaattaatcacaactcggggtcaaagtgtgttctatgcctgaatctctctatcccagttcaactatttttggtgttaccttttatttatttaacaaatggttgcactaagcctaatgagttcatagcaagtcaagttaacaaagaatattaactctatcacacacatacatacatatcacattcaatccgcatcctcctctcactcaccagggaatcaagcgtttcactcaactcatcaaatagtgagtgttatttacacttaacattataacatgttacttttaccatatgcttgacaagaatctaaaatcattaccacacaacaaatacacacatattaagagatttttttttctgggttgtagtaaacctagggtcatagataaaaaaaatatttgaaacaaggttgatgaagcaccaataatgcaaatcaactttataattaatatcatttcaattccatttcagagtagtgctgtcttccactactccactacttcactctgcctgtagtttcttataatcacctacaagataatatcagtagaatttgttacttttgcttcgaacactgactgattcttagtgtataattatcgccatttgtaaacacatataaatagaatgaatgcaatgaaaaaagacaagaattataaattactttttagtgtagttagcatagtgtaatcgtctatagtgtagtcgtctgtttttaacaatagttttatcaatttttataataattaattatcttaaaagtcacattaacaataattttagttaattatttttttacattggcaatgcatattgattaaattttaaataaaaaatgtagtttaaaaaaaacatataataagacattttagatttttttaaaataagttttacatctttgatagaaaatataaaatcttaatgtaggtattagaaaaacttgacaacacatttatttcatttaattcacgcttatttgaaagttataataaatacgcgcacttaagctatgggatacctattagattttttaaggcactatttttttaatactactatagtactatgtatttattctcttttcttgttttttcacctctactgctctgaaatggaattgaaaagaggattgacggctcttgcccattcattcacaagctattcaacttgtttatttaaacaaacagctcatgctgatttgatttttgcgtgcttatcgttctttactgtcacctggaattctttttagttaattacttaattaactcaattttctgggaatcataaatacctgttttagtttgtagagtttgttatgaagatcaacactttcatctgaaagggatataataaacagaaaaacaacccggtactaaaaatggaaaattgattcttaacaaaaaaaaatttcgtgggcaaaggctgaaaattaaattagaggtgtacaagttgaaccaaactttaaatttaacttgttagggaaaaaatataaaacttaaactaataaatttaaattgtttaactcatttatcacccagttattgtttttaggcttaattactgttttagacttaaattttagagattaaaaaaagcacacctcaaattcagatttaaattgtaattaaatcttgtttaaaattacttttgatatcaaatattaatttttacttattttaaaaattgttgaaaccagtatgacaaagaaattaaatggattgatttttcaaattaaaacataatgctaatttattttaaatttgcactttaaaactgtcacaaaatgttaaaaaatatgataaagtactataaatcgacacaaaatattaatttattatgttagagactaaaaataataatttgtcaaaattcataaactaaaaaaaatatttttaaatttctaggactaaaaaaaacacctcctaaatttagagactaaacaataattaagccttatttttatttatcaatttcatttgacttcttttgaagttagatattcactttaaaggaataaaatggataattatctaatccactaggatgaattcagaggcgaagagttttgatttataaaattgatttggtgatgaaaaggaaaacaagaaataaaatgttatggatttaattaattattttattaatattttagcaaactaaccactaacatttcacggataaaaaaaaaaaaaaaagaagcttgcaagaccgtttactttatgttccaaaatcagctgtaggcattcaagaatctggttggctattttgtggggtgactcgtttactaagaattaatgtgataataattaataatttaattccccatcatgcacgatacttgttactctatataaggtcgaaatgttacgtcacccaaaattcactcacaataacaattcctacacagcctcaaatcagtattggtttttgatccccccaaaggaattgaatagcagcaattaacattatgggagccaagttttccacttttgagtttgttgaaaaatcatcacattcatcatccctgatcctcaccttccattccactgctaaatggaaggctcactttgatgtctccaaagaaacaaacaagctggtaagtttgatatataaattataaaatgagctataattaacattatcagcttctgaaattctgggtttaatttcatgaggccattagttaattgtctttttttaattcattaaagatggttatcgacttcaccgctacgtggtgtggaccttgcaaatacatggacccaattatcaaaaattttgctgcaaaatacacagacgtggagttcattaagattgatgtggatgagctaatggtaagattcgcgtggtttctttcataatgataatatatatacttttatttttaattagttttagaatttaattttcatacacccatattttatactgcacatggagtagatttttatattatcaaataattataaattatattaacgattgagggtataagaattgatctggtgttgtttagtttaataaataatcttaatttaagttttgatatgcattgaaaatttgactgatcaagaaaattgtcttcatcaaaagatacttatatatgtaatttataccaaaatattatacattttcttacatatattactctaaaattaattattaaaaattttaatattttacaatatataaaaatttatgattggaaaatattataatatataataaaaattacatattctaattaaaatcttagctatatgccccattttgtttaacagaaaaatttactttaatttgatacaaatgtacatataaatggaaacaggaggtggcccaggctttccaggtgcaagcaatgccaacatttatactaattaaaaaagggaaagtagtggaaaaggtggtgggagccaaaaaggaggagctgcagaaactgattgataaacacaggaattgagcgatggctttaatttttaatatatatatatatatatatatatatatatatagagagagagagagagagagagagagagatcaagtgtgttaatcctaaaaaaaacatgtatattggtgtaaggtgttgttgtctggcaagagcatgtatgatcgtgtatagacattttgggatctaaggtaaaaatgttaaaaatgttttttttttacaagaattttaaagagatttagtatattatataaaatatcaatttttatattaatcttctaacttttttagctgcaaaatcatttatcagagttttataatcaaataattctaacacttcactttcaatagataaaataattaacccattcaatctatcttgtaactcattcaatatgattcaatctatcatgtttttcttcatttgacattgttcgttgataacatgatgaatagaaatatctattattttcatcttttggatattgaaaattgtcatgtttgataggatccttttctatcactaaatctctaaattttccatcaatatttttctatagtcttaggtcataaatatttgtaggtacttcactagaagtgttattatgctcaacattcccttctactcctatttctaaaatattgtcttctagttcttgattgaaattataattatttgtgttgtgagtattatttataagtggttgttctatcaaatttttaccattgtcagtatcatctttaggtggttgttctacaccgttgtcagtattatccatagatggttgttctataacattttcttcgttgttagtatgatctatcagtggttgttctatcacattttcacctattgaacttgcttctacgtcatttttatgaataataacaaatttatcaagggcaccacgttgagattcaattagtttttcaactttttgtttttttttcaatttttcataactagatttatactttctatttgacattttcttttgtaaataatcaaaataaaaaaattaactaaatattaaagaaatctaaataaactaaactctaaaataaatatagaaaatgatgatcgatgaacagaacgatagaacctaaaattggaaacagccagatattttgttgtttagatgttgtatcaggcgcaagggtattacatgatacgtgttgtattgctgcatacccagagtcatgtccgtgaaatgaatcattccaccaatccaccatgatggagatgaaaggctccgtacgcgagacgccgagatatatgcggtttataggcgttcagaatccagacgatgtcaaattcagagaggttgagccacggagacaaagtttgatcaatagacaataggtttcattcaagggaaagagaagaatagattttttttatgaacaaaagatgaggagatgaaaaaatgtgaagaatggagtctgaagagtgagatacttagttaaggaattgtgatgggttaaaggaaagttaatagatatttacttttttgggataaataaaatactttaaatgacattaattatgatattggttaatttttaaaaagatgatattgatttactaatttttaggaaagagagagattctaaattattttattttaattagttaaaatttgttaatagttaataataaaaaaattttaggaacctaaaaaatttttttttgggccctaggttgaagcctaatttaccttgcatcttaaacggtccttagagcatgacattgtaatgtgtaaatctagttgtactctatgtctagtatgtatgcatacttattgtcaaggtgagactattattttagttccaataaagtgtgagataacttctataaaaaaattgtaagatggtaataaattaatccttaaaaaataaaaaaattaaatttaatcttataataggtaaaaaaaaatgtgatagattaaatatgtgaaagaaacaccccaccacttagtacactagaaaatacggacaaaaagaagaaaagttttaattagaatgaccaatggagttataaagatttcttttatttttttaaggatttttttttgtttatatataaactacgacagaataattattgttttaaaagttttattgaaagtgatttttaattggttaatattataaaacaaattatttggtacatcaaaattaaatctttaaaagaaaacaaaagaaataatacatgttttaagaaaaagaattcttgttagaacaagtacgtttggttcgtgggaattgaaagataaagaatattatttatgattaactagaaaaaattaacgatttcagtttcaaagtttgttacatgcatttagaaaagagagaagagatgagattttatcattaaaagttataccaactatatatagaaaattaacgatattcgtggacattatttttttcacccgaatccgtccaatgtccacccctacaaaagatgcagcgtattagatattagagtatataaactccaagtcaaatccaaatattatatactttcctaaatacaacttagaaattaaaaaatagattattacatataattatcaatttatctgaatctctctctatataaagatttaaacttttccatttttaaatatattttataaacctttttagtcaataataagaataataattttttaatatatatatatatatatatatatatatataaaattgtattaaacaaccttaagaatgcaaatatatttgggcatttcagaatttcattggctttttttatttgttggcatcacatcaccaaatgtgattttatctcttttttatgttaccgactttatatgttactgacgaaatttattatcgaccaaaaatctatcagtaatatccgtcggaaaatttaaagttttcctctgttgataaatatccgcctgtacggtgattaatgtttaactacatattcttgatccgtcgataattagacttttacttataatgtacgtaattaattcaattgtttgctgtgaaattggggacaagtgtgttactattctttaatttttttttcttaaataaaatattttttataacgtaacaatttaaattgatcattttacattaaaaagtgaagtataaatgtacttctttaacttatatttaatttttttaattagtacgtataatatttttgtatgaataatgtttcaaaaatgaagtttgataatgaaaaaaataagcactaaaaaacttaattcttaagtttacaattttttttctttctaaatggtcgggccaacgagccccagaaccagaaaaactagattaacaccctccatgaactcaacagcaaaggaggggacacaatgaaaaataacaatattacaaaaggtatcaaagccaaacttgacaaaacataatcaagtaatactagtgatgcaagagagttataaaaatatagttttaagatatgaaaaacatattaattttttattatgtttataatttattttaagcaaaacattataatctatgttaattatcaacttttctatgagtggttaattatgattaaaaaattgaaatatataaaattttataacatttaaaaaagagggaaataaaaaataattaacctaactttataatcattgaaatcattgaagatacaactctaattttataacatataatcataataatatgagtgattttcacattcacatgattaatacgaagaaaaaaaatataaatatttattttactttttatgcatgagtgttctaatagagttaaaataaatactcaagaaataataattttaatttttttggtgcaattacaaatgacggctagtttaaaattaaggttagccaactttttaatccctaaaaacttttgaatttgatttttagtccttgatcaaaattttaactaatcaaagtttctcaattttgtttcataaagattttaaacaaaagtttaactgatcaaatttttaaactttttaaatatttaatttttagtttttgaaatcccattaaataaataaaaataataagatttaaacttttgttcaagatctaaaaataatgtgtttagatccttttaggtatttcaaatctaaaaatatttttttttataaaaatgctagcgagacttttttattcttttacactattttttaatgctctattttgttttatctttttagtttgaaaataattcacttttgatctttattaggtggactaaaatgaccacataaaaataatcttaagactaaaagtgtatagtttttaaaataaaagacgaaaataatcactttaaattaggtagagtgcctcaaatttaaagggaaaaagcatttatgccttatcaactaatagaaaaattaaacgttgttggctaataagatataagtcactatcagtctatgaaacatatctaatttgataaaaaagaaagcatattcaaaaaaaattattctctataatccaaccgtttagaatttactaaatagagcctgtgtgtacgtagggcatagcttttttttaatttctttttagtctctacatgccacccttttttctgcaaatttctcttctgcgatgaacctagaccgttgtcataaagaagatgccttatggctagccgcaatttaataagtgaaacagcacattgagtttgacctgacaaaagcttcgccatttcaatttatgtggtgcagaaaaatggcttattggaagctttttcctcttatatataaatttatggtcttttgggcttccattttgttctgtcatttgcggttcagattacatcgtcttactttttctttttttgttggattaaagtattatgtttataatttgatatgatttatagttgcatacaatgttgagttttagatcgtgctgagtctccaccctcagggatgggttgaagatcgatcccaaaagattctacgaatattaattcatatttgaatttgggtttacaaacttaaattcacgttaaactcgtaaatttataaaaatttcttaagtcttgtttatttaaacttattttttagattttcttttatcatcaaacatacttttaagaaataattaaatctaatataaattgattttacttttaaacatatttttaaaacttataccgaaaattcaatccaaatatacccttaaagaaagggcttattggtgtctataaggaaaccatcactgtggtcattggttaagagactctctaaggcatgactattttagatgaagagagaatcatggcactcaccacactatttttgtattgttattttaaagttatattagcttatttgtagtattttttagggattcaaataacatatataaagaacgaaagagttgaatgcttgtccactcacaatataaaataattttatattattatttagtcataaattattatttaaattaattaaaaatgattatatgaaaagtcagaaaacttataatacatggtgaattatcattgaataaatatatataaaaattatatttgtataattcctaaaatattagtgtataaaataaaatcacaaaatatgatgccatcattcataaaataaaatcacaaaacttataaattttaaatatataaaaataactatttatcttgtagaatgtagatactaaaatattgttttataactaagtttccttaaaaaaaaaactttatatgtttcagtaaatattagtatctataatattaatatgcacttatattgatataaatttacttatttttttaaaatgttagtaaattataaatttatttttttaaaatattttcaaattatagtttaaaattaaaaatattttttaaaatataagtattaagcaaaaatacttttttctttactaccggaagtaaattaaatgtatcgtcaggggaaaagaggaatagaacaattatattcagtaatgagattgatgccagatgcattttaaaagcaagttttgttgttctggtgcttgaaagtccgcctaatttaccataaatggaataaatgagccaaattaaaatggctgtttaaaattcaggctttacttaaattttttaacatttaaaatgtatggtcgtttaaattgattgtttattttaattttgtgcgtcttaccattttacataaatttaagtattttatataaaaatttactcgttaaagttgctgtttaatttaattttgtggattctatcatgtttaaaaagcctgttatttatggtataaatatgataaaacaaggttgcttgtataagtaattttatgtcatttgttctaataaaaaatatataagattggttggatagttaagaaaaaaaataaaatgatggaaatgtcagatttgattttttctgataacaagaaactattaaaataacaattaatatttttaaaaaaagatttaaatacatttttcatttttgtaatttgggaagtgtattggaataggattttaaagattattttagcataaaaaaatcttgtgaattttaaagactattttacaagacttttatattagtttgaattttaatgtgtttatattataagaatttaaaggatttaagagaactttatagatttataagatttgaaagaattttatgattttttttaaaaataaatttaaaattataagaattagtgaaaaaataataagaaatgatgaagtttggataaaaaaagtaaaatcaatataattttttaatattttaataactaaatcaattctaactttatgtcccctgttactaatttatcttgtaataatattttttcattttcacttttgaatttgaatattagatttaaaagtatacattggttttcttattttttcttaattagtgtaattattttatgataaacccaatgacatgtttaaatgagggtgcaataataagtatatactattagggagtggtgagagagaaaaatttaaaggagacttacttaagttatgtggatgacgaaattaaagataacaatcacataaacattgcgtcggacaaacaatgaacatagtcaatataagaaaaatatgattaactttaacacataagacaaatattaatttaatttagaaaacaaacgaaaaaaatgcttaggagagaaatatatttgacatttttttaattcaaaataataagagaaacatatatacatctaagaatatgaaaaaaagaagataatatgtatgattataaaaaagaaagtctgataaccaatataaaaagaaagaaaaaagtctaccataatttcaagagtttgagtgagattgtttgatagatattttatattaaaaagtttaataaaattcatcaaaattattcttaaaaatcaatcattcgaaatttatatatttttaaatggagtaaagtaccaaattagtccctcacttttggaggtgcagtcaatttggtccctgagatttaaaaaatatcaaaatgatcttttactttacatttcgtttgtcacgttagtccctgctgttagtagtctcctaacaccgttagtaaatgtgtgatgtggcacgttaagtgccacttggacgcacacgtggcaagcgtaattggaaaataagcaatgacacgtcatagggactaatgtgacataattttaaatgttatattggaaaatgaagagtcaatttttgtatatagtatcaaattgatccctaatagttttcagtctaattgaaaacgtgatgaattccctctcaccattttctccctcctatggttgaaggataacattcctgtgataggtccacgtcgatcatcgctctcccagtgatggtggttgtcgttcttcgtcacctttcactgttcattgacgcaatcaatgtttttgtgtgttccacgtcgatcatcgtcatcctccagtgttgattgacgcaatcggtgttttccagtagaagtaagagttttgtttttcactgcatttggtcttctcgtgttgaaccagcgtagttgaaccgacactatatcattcaaacgcattgttatttgcgtttaaaccgttggagtagtttttgagagtgaagggtttgagattttggtttaagaggttattgagaatagcgtagtggtgtagtgtgagatgtgaagcttttgagagaagaaagtgttctctgcttgagatgcgtgcattctaataatgaatgagaggggctttaagggtgaatgagttgatttgttgaggcgttattcttacttgcattcatgaacggattgacatggcattctcccttgtgcttgaattagcagacatgatagaccacaaaataataaaagaagaactacaaagatgaatatagatgaataggagaagaataaaaattggatgagagtatgagtaggaggaaaaatggaatgaaaacgtgaatgttaaagtagttgttagggttttaacattttggggaaatagatgatcacttaaattatgtcattttagttcctttaatgttaatttagtccctccttacgcgacaagtataagaaactgatgtgaaagtttcacgtgtgcgtccaggtgacacttaacgtaccacatcacacatttactaacggtgttaagagactactaacgacagagactaacatgaaaaacggaatgtaaagtcgatgatcattttaacattttttaaatctcaggaactaaatgaactaaattgacagcgcctccaaaagtgagagactaatttggtactttactctttttaaatgctaaaagactttttataagttacaaaaaatcttaattgaatatcaccagattttattttcatccttaaaaaatcagtcttaatttaaataacacaatacttatttatatcattaaaaaattctaattgaataccacaaagattttttctataaagaatataaatcttttaaaatcctattcttaatgttttttttttatattttcatttgccattttttttaccaacaaaatatttaaggagtatgttggtagcattcatgattcacaatgcaaattgcccaaacattaaaaatgtgctcttttcccccgactcgtgaactgtaagtgtccattcgagtacttactagcatggcagttagcaaagaatccgatacccttgaaaagtgattacttctttgcacttttcttgtcctataaatgagtctttcctacataatgctttcatcagccagaagcccaacctcttctaagtagagagttatacaaataaattgtggttttctcagtcaccgaaagaaaggagcaagatgggagccaacttatccaacatggagaatgctcataaatcatcaaagtcatcatcagaccacattctcaccttccattccactgctaaatggaagactcattttgatgcttccaaagaaactaacaagttggtatgttaatacagctacaattgttagtccttcattttaatttttcactttttagctttcatgatgatattgtgtcccacatttttttacttttttttttttgttgctacagatggtaatcgatttcacggctacatggtgtggaccttgcaaatccatggacccaattatccaagagtatgctgcaaagtacaccaacgtggaattcatcaaaattgatgtggatgagttgatggtattgctcattttcttttctttcactcatatgtctcttaatgttaagagcaacacactatatacattgaacatgtattactattattttgcgcgctgtatccacatttagatatttaaaatcgattatcatctcaacattcatatttaattaattgtaaacagggggtctctcaagaattccaggtgcatgcaatgccaacattcatattgataaagaaaggaaaagttgttgataaggtggtgggtgcaaaaaaggaagagctgcaaaagcttatagagaagcatctaaactgagtagtacatgtgtgagctttcatgtgccatgcctatgcctatagacctctaaaggaaagaggaataaggagaaattcttcaacatctcctgcatgccataccccattatatcaatggtatgatgtgtgtttagctaatttacttgaaactaaaaaaaaaaacattgttgatgtttaaagcatgtacgagtgtaaccaattgtaacttactttttaagagacattaatgccaaacgagcattaattggttaatttcaaaattatttgtgtctgacatagtttaaatgaatgatatgatagcatttcttttttggttattgataatctcttaagtgaagtttttgagacgtaatttaatcttaagtaatattatttggtatgaattatttttaaccaataaggaggccaggaatgtataaatgaagagagaatacataaagaatttgaatagagaaaaatatcgcgggaataaattattttaatgtgatttgataaaaactaccgttctccattttggcaccataaacaagcgattcttccaacgatggatagaggttttagcacaaatttacgatgcgtgataatttttaatttattataagaaaaagtttgccagatataccatcatttgattttgtttggatgcttctcagctttgtttatttttaatttcactcaagcattaaaaataaatttcaatcaatattaatagagatgaaaaagtgggttatacctggttccttttagtccacctagtgacagctccaagccaacctgaataagatataaattaaattttaagagaaatattttactttaaatgagataattatataatagattttttttttttatcgacattcatgtactttttctaacatatcatatgggaccttttggttttataaaatctaacaattttatttatttattaatgtatctaaaactctaaattttagttgtttatctttaggaaatcatgattcactcattaatgggataggacaataacaaactcaaataaccataaattaataattcagcaagtaatcaatgcaataaaaaaaatataataagacatgatcaatcacacatatataaatagttagtaataaagattgtaagaaaataattaaactaaaaagagatttgggggtcaattttctcccataaactctttctcaataaaataaagaggttaatctcccctctgcctttacctaaagatcataaagcaagtgaaagaaaaggagaagaaaaaagcttgctccttcaagatgcaccaaggcaaagaaagagaagctttgaatcaccaacaagagtttgtgatttttttcccttcacgctttgaataagaaaacaagaaaattggtgagaatggtttgctgtgtgtgcgtgtctcggcaacttctttacagaacaagaatggtcttacaaatttgtaattaatattatgaaacccaattcggccgttgatatggtcgaggtaatgggttattgggttagtagtccatctgatagattagtaattggttcaatttgatccgatatatatttaaaaaatcaaaattatatatgtatctattatatataagtacataaataatattattcgattaaaaaaaattcatccatactttaaaatttaaaataacaattaagtatcaaagttgataacacaagtccacaaataataattcaataatacaattacacaagttcatgaataagttttgaaatgaaaacacaaatagcataaatatgataacatccataatttatatccaaggagccaatgttggatcaactttaggtaattcttctctatcaaaggaatgagactcttcatcaatattgctttcatttggagtaccatctttcatggtgttgtctcgtgattgtagcacatcatcatcctatcttcatcaagatttaattcatctatgacaacatcattatagattcaaattaacaattaccataagtacataagtggtacctaataaatactaatgttattaagaaacataccaatatcatctaaagttgattgaatgaacatgtttgcaagatcattacgtaaagcttccacctcttcatgagttaagaatagtggtgactcctccaacatccaattagaatggtcatcaaggatttccaaatttattgggtcataattttgctgccttagtcgattcctaaatcgatcaaaatgctcatatatcaacaataaaaaaatcaaagcaaaataagtaaacaatcaaagcataatcaatattataatacctttgttgtatcctcaagttatatcgaacataaacaaggtcattaagttttttatgctctagcctattccttttttttttaatggatgtgttcaattacactccaatttctttcacaatccaaagcactacaagtttggcttaaaacacgaataaccaatttttgtaattgtggaacattacatccttaacaatcccaccattgatctagaatataacatataaagaaataaatcaatataatgaatatattatgacttgctaaaataaattacaaatcaataatgctataagagtatcaaacactaaatttacttggcatgactgtgttccgttcacgtattgcaactcgtcttgtaaaatctccttcaaaatttttatatatcctcatgtcttcatttaatttatcttgcaactcaagatctccaagtgtatacctatcaatgaggttcaaaatgctagattgtgtgttcctatgcttctcaaattcttcagcattgaatctacaagctggatttaaccaataaacagctacatgtagatctttgcgaaactctgaatcctaacgcctatcaaggacctccaaataagacttcactttcctcttatttctttgaaacctcctaaccatctcctctctggccttatggataacctagtaaagaaaacccatgacaagtttatctatactatcaacaatatgtaacacacgaaccaatgattttgtaagcttcacaatattagcacattgtttccaaaaaccagagtccaagatttgttccacaaattttttagccttggagtatttggcataagttgatcctatccaatccttagatgtcaccatagccatcaatgcattcttttgagccaatatgatttgcaaggcaatgaaattagttgcaaattgagttggagctggatgaagtatatctcttccacctgtatggtgtctcatcaagaataatgcataacaatgattatatatgtacttagtaatttttgaggcatgtaaaacaatctcacatacttcctcaaatttcccaaagtcttgcaacatcaaattaatgcagtgagcagcacaagaagacaaatataatttaggaaactctttttctaataacctatcaacaacaacataatttgcagcattatcagtcacaatgtgaacatgctccaacatataacatcatctccttgaaaagcttaaacaacatttaagcagttttagaagcatatgaagaatccacaaaccttaagaaaacagtccctttaagacaataaataagaaaattaatgagagttctcctagagcggtcagtccacccattagccatcagagtacatccagtttccttccaaacttctttgtaactttcaataaggttcctcacatcatcaacccacatatttaacaaaggatcacaaattctataaaaatttggagctttataccctagacttatgctactaatagcatcaatcataggttgataatatgccgagctaactacattaaatggcactaaagcatctatcatccattttgcaatggctttgtcacacttttctacaatttgcatattttgcaagacactcttcaagttaggttgagcttcaggaattgttctaggcatgaaatgatcatctacatgaggagtgttcttccccttttgagacttggaagaaattggtttttgaattcctcttaattcctcaactattctcacaggatcttcatacatttcaaatgtattactttcgttagattgttcctacacttttctttttgtattttttttcaaattgttcaagtagttgcttcgtttgatgttggacatcaacacaaaccttcatgcaagcctatacttggcctttttgtctagccaagtgagccttaaacctactaataccacctcccttaactcgtttatcacaataaatacacatcgttgtcacttttgtagcaccttcatcaattttcttacaatgtccccaagctaaattatttttccctctaacgatgaagattcagtagatgacatctttaagtctaattgcaaacattaacaatcaaagaaattacaaataactaaaattttaaaaagactaacttaattagttagtgagcatatcatcatatatgatattgaaagaaattccgacaataatagatacaaaatttctcaagaaaatactctaccaaataaaataaataaatgcatttaatgtcttgaaaatacaaaatgcattcaatactaaaatccaatcagtaaaacccaaaggagtggaaaactacatccaataaaggctaagattataaaaccagtgcatgaactaaacggatcataacttttcacccttcaaagttgaaagaaaaacaggtcctggtaagttctttcaattgtatactgcacacacttttcacaaggaaatgggtgataacactgtacccgaaatacagcggactaaccttgcaaatgtgggtttaactttaaaaagtcttggtattgacaatgtaatgcagtttgattttatggatcctccacctgatgaagccttattgaaagctcatgagcttctatatgcattaagttcattgaataagtttggtgagttaactaaggttggtagacggatgacagagttccctcttgatatcctacatggtcaaaaatgacagtggcctcagaaaagtacaagtgttcggatgatattatctctattgctgctatgctttctgttgggaagtcaatattctaccgtccaaaggataaacaggtatacgcagacaacgcaatgatgaattttcacactggaaatgttggagaccatattacattactaagggtctacaattcatggaagaagaccaattattcaacgcaatggtgttatgaaaattagatacaggtaaggagcatgagacagactagggatatccgtgatcaacttgcaggtcttttagagagggttgagattgaactaacttcaaattctagtgatgtagatgccatcaagaaatccattacatctgggtttttcccacactctgcgagactgcaaaagtttggattatataagactattaaacatttacagaatgttcgcatacaccctggttcgggactggcgcaggttcttcctagatgggttgtgtaccatgaactagtactcacaaccaaggaatatatgagacaggtgacggagataaatccagagtggttggtggagatagcccctcactattaccagctgaaggatgttgaagattcatattccaagaagatgcctcgtggagcaggacgtgcatatttggacagatagcgggcacagtggcacatttgttaaggttactcttcgtttatatactctattttttgtcgtattactagtaatgtggatgcaagatcttcaacactaagctatatattattagtttctgtgttattttttggttttagctatcataaagttaaatacctcatttgttggtttatcttgcatatacaataaataagtcgttatctgctatgaattagcatgaacaccaaaaaattgtagtcatgttagtgtcggtgtcctcaccttataagttagtgatgttgataattttgtgtttaggcaggaacaataaaattatacacggattacaactttttgttaagtttttggcaagcaagaccttcatctttaagtatatgaaatggttaaaagtgaagcaatcatacaagcttctacatgtactgctattattcgcaaatggaatatgtaacttacatagcctagataacaacttaatttttccattatttcaactcaattctttaatgctcattcgactacttactagcgtgaggtttttgaccaaaatgagtcatttatattattttggattggtctcaaagtatttatcagagtaggtgatttgagcctcgtattggtgacaccagtcaatttcttttcaattgagtaacgccagttaactccttttcacttgggtgaagtcaggcttctccaagccagtacagtcttcctgacttgatggtttcagactaaattggtttcactcaatgcttatttatttaatagtatttctattaaatattattataaaactataattttacctattaatttttttaattaaaactatttttttctacgcaactaaaaatgcccaaaataattttctattaaactttattcttcaactatactattttctattaaattattaaataatttttttatacaacattaaatttcaatacaactatattttttctacaaatcacaacattaaaattgtttacaattttttttttcatagtcaaaaaatgatcggaatatatttctattaaatcttattataaaaataaatttttatcttatattttaaaactatttattttttataaaactaaaaaatcgcaacaatgattttaaaactattttttagttttgtagaaaaaaatagttttaattaaaaaaattaataggtaaaattatagttttacaataatatttaataaaaatattattaaataaaaattaaatgaagttgctcagcctgacatcacttgtgtgaagtcaggatgataccaccaagtcaggaagctttactatcttgaagaagcgtgtctgactaaatgaagtcatctagggtggtgccaccaaatccttaaacacttgaattggtaacactttgtagagtaacactacccacgtagagaggataggagttgaatgacgcaccagaatcttaggtggcttgaatcatccactctagtaaatactttggagatcaactcaaaatggtatttaattagcaaaaatgacttattttggtcaataaccctactagcatgtgtggcatctagcaaaaatctgtatccgatatgttttcaagtgattccttgtgcttttctagtcctataaatgaagctttcttaaataatgctttcatccaaacaagtatgccgcaaaacctcttctaactagagagttatacaaataaatttggttttctcattcacccaaaagaaaggaacatgatgggagccaacttatccaacatggagaatgtcataaatcgtcaaagtcgtccggccacattctcacctactattcctctgctaaggaaggctcattttgatgcctccgaagaaactaacaagttggtatgttattacaactgtaatcgttaattagtccttcacttttcctctttcacttttagctttcatgatgagattgtgtcccccttaattacttcttttttttataccattttgctaaatatgatgatcgatttcacggctacatggtgtggaccgtcaaaatacatggacataattatctgagagtttactgcaaagtacaggaacgcgggattcatgatgtggatgaattgatggtaatgttaagacttaagagcaacacacactatgtacatcatacatgcataatgcattattactttttttacgatgtatccattaagatattcaaaataacttctctaagtgggatttctgtttcaaatggatagggatttcgatggttctgaatgcagatatgcgaagtcagtttcatcagttttgtggtttggtaggtggttgtggactggatggggagaagtggagggtggtgtggttttctgttataagagcaatgtagattggcgggaatcagattatttttagacataaaaaaagcccctccaccctaaggatatttttgataatgctttactgcaagcttggaagtggcttaaagcgaaaacgaaaggtttctgctattcgttgacagattggatgcagaatccgattgtgtgtttagggtgtagaaattatgaaaaagctccaactttgcaggagaggcttgaattttgttctgtcattattgatgtcaatgattggtttgtggaaacttctggtgcaggttgctatgttgatggggtctggaagggatatgttctcgtgacgtatggattgttttggaatagcaaacagtagtggtgtgcatgcagggatgtcctactaaggatgagtttgaataagtttgtctagaaatattttcagaagaaaaaaataaaacaaaatgaaatacattttttcatatgataaaattaattctttattagttaatcattaattaatttgtaaatattttttaatttttaagagaatttttttataggcaattttctagagaaactctatgatatatgatagaacttttacatattaattaactaatgacctaattttaagaaaaattcatttcattatcttcacatttgtaataaaatctcttagttataaggcatgtggttctttgtctctattttcttgttttaatatttttttaattttttacatataatatcatttaatttaagatttttaattttgtgataatttttgtcaccacttacttactgattatgtggcattcatttaaactatattatgatatttgacaattaaatcaagtaactcgttttagaaagaaaaaaataatctcaattattgatgaaaagttcaatggttattacatatacgtgttggaatattaatcattgatcttctcattaactattaaaattttagttacattcataaaaattagaaatattagttgaaagagaaacacttcatatctctatttatattttttaagaagaaaaagtaaaaaagaaaaaaaaataattgaagaaagtagtaacaaccattacgttttaaaggttcataaaacaaataaaaatagttatataatattatataccaaaaagagataattatgtttattaatagttatgaatatttaagtgtttttatttctccagcttattcttttattagtttataacaataattttttcctgtatactatatttttttttgtctgttacattattttcttcataaacttttaagattacaatatcatttaattttatagttgaaaaaagattaaaggatatactatatatgaattcactctgaaaaaaaaatataggggaacgtgattcttggttttttttttaatagataaaacatgattcttggttagaagttagaactttatttcaatttatacgcctatagtgacttacattttgttcaatcaagggcagtagaatttggtgccaaaagtaattaaagataatatgaagcttctttgaggcaaaagcagtggagagttaaaaagattcgtacacctcatagacaatgatgtatcacattaaaaagattcggtgttataaacttctttagtaaagtttccgtgtttcatttttttctatttatatatatatatatatatatatatatatatatatatatatatatatatatatatatatatatatatatatttccgcagtatattgattattgacaacgtacgtgcgttgtcataaagatatactagctatatgctcttgtaatccaattgtgtaacagctctcatttgtggttccacaaaaataaatgactatgcgactagctaatttgatgagagagggttacatcagaatcttcagatgctgcaatagttcaatcaaaaacttcttgctgatatagaaatcatgattttacttcaagcagcgccaagggggaatgtacatcccttcttcttgatcattttggtttttttcttttcataagatttctgaggcttagatatatgaatttaagtgcgagattcttatgtcatgttgcatgcattgagccaaatacaattcctagtatggttgcagccgggttgcaacacagaaaacaaattcaattgagagaatattttgaggaagaatttacgataacctatgaatcatggattcatggttggcagattactcgagagaaattttatttaggaacattgtttagccttctatatttggaataaactttcagaaaacatcatagccaaaattggttatggagaatgatctttacctaatattcctacacatacattctgtataagtggttgatttaaatggaactgagcttgtatcacttaaacaaaattttgaattttaagttttattgatgaaaaaaaacttgataaaaagaaaaaatattattaaaaatgacagccaggtcagattttttaatgaaagtgattagcaaagtttatgaatatattttgtaataacaaagttttttttaaaaaaattatataaataatgcaattacttagatagaaggtgcgtgataaataatgcgattaacagatagatagaaaagaattccataaaaaaaaaaaaagatagaagatatgaaagaggaaacaaatgtataaatatagggatggcatgctcatgcaagaattttcttttcctactttagccaattatctccaatataatttgataagcattaattttaagaaataattacattttttaaaatattaattaaagtataattatttcatcaaaataatctaattcatgtggcagtatagttccagtacttttaaaattagacttttttttatacataagagtttacacttgagatttttttatgaaattacataaatactctttatttttatctcttacactaaatcttcttaatttttgaaaagtataccctgaccctcctttatgcattattcctataacactctttaccccaacatatatataaataagaaaaatatataaaaatatgaaatttaattaaatcaattttattcacattacttaaacgaagaaaaacatacaaaaatatggaattaaattaaatcaattttattcacattattacttaaattaattcatgtagataaaagtgtcacattcgtttcactattactaaataaaatttattaaaaatatttttaactcaaaacaaggtcgtccaagtttacaaaatgactaagttaaatagcggaataaaataaagtaaaatacatgtttggaacattatgcacttgaaatagaaatacatgttccaatgttacatcctatcagaacattgtatcccagaggttctttaaagttatccaccttttcagttgctcttacgaatacaagattcaagatcattagaggatccaaacacaaacaacacatgaggagtgagttatcacatttttaaataaagtaaaatacatgtttggaacatcatgcacttgaaatagaaatacatgttccaatgttacatcctatcagaacattgtatcccagaggttctttaaagttatccaccttttcagttgctcttacgaatacaagattcaagatcattagaggatccaaacacaaacaacacatgaggagtgagttatcacatttttaaataaaatacaaataaacaaaatataatcaaaatacattatagaactatttataacataactcaacttaatacaattcacctcacttcactactttttcaattaaaattcattatagaaatcatcaattacattatacatgaatcacacacttgagtcaagatgtaacaacactcacaaatttcataataaacaattcatagacgttatgcaacaattatactaagactcaagcctatatacgatgtggtatcatgtcagtgaaaaaaaatactggggcacttatgaatacataacaagacacgccacacaatgagtatgtcaggtcattttcactaagtaaaattataaggttaccaatcagggtcactttgttttgcaagaatgttccaaccataagggatcaacatagacttaaaatcaaatcgagtgtctttacccccaaggtctagactccgaagaatccgttagggtttcaccttcctgattcaggtccaacccctaaatcaacttttgcatgtagacactgttcatgaattatacaatactcacgacctcacacttgtgtatcaaacacatttaacatattgcgctacaatttaacacttcaggttcctattttggaaccctacacttttcctttaacactttgcgtataaacacttttttcaaggtaaacactagttaagttattatataattcacaactcacaacattgtcacatcgagtattaactacacatttattcacaaacatatctcatgtccaccatttaacatttcataaatgtcacaatccatcatcacatgtttatgtgtatttacaaattaacacatgttcaactttgcacttatactcaatctcaataacaatgttatgatctcaaagcaacatgttatctcacaatttatcacttacacacaatttcaatcacaatttcatgatcccatataacaatctcgtaattatatcatacatgaagaattataatacaataaatatcccaaataaannnnnnnnnnnnnnnnnnnnnnnnnnnnnnnnnnnnnnnnnnnnnnnnnnnnnnnnnnnnnnnnnnnnnnnnnnnnnnnnnnnnnnnnnnnnnnnnnnnnttgcatgcgatgagtatttctccctcaacaaacattatttgtaaatcttcaaacggtggagatgttgagaaaatgaatttctaaccttgtgttcgaatttcacaaatgatccaatggttaatgagtttagatcgtagttttaatggaatagatttaggtgtatacaggaaaataagagctatgtgcgagggatatttctctctccacagacattatttcgcaaatgccaacaacagtgacgtgcgaaaatgagttctgaatggatacaaatttttggttgctacttagtatcagcaataggtctaaaaaagtatctaaaaatatgaaatttatatatttgtatcctgtcgaggtaaggaaccatggtatatatgtttggaatagattccattttgagagagttgaaaaaacactatcttgttgaaaggttatatacattttccctttctcaaggcatttttttagacatggactccgttttttcctttttttgggatggtaaatatttcttagaacatggagtgtgaatcaaacccatgtttgaattgaaattgagatactgatgcaagttcttcctttctgaatcatgtatattcatatctgaaagaggttgacaataagttttttcaaaatggactatttgtccctttgttagaggtgttccagaaatgtctgcgatcgagtaaataactctggtgttcaaatttcataaggatccaacggttaacgagtctggattcgtagttttattgagacacatttgaatgtatgcgggaaaaaagaggattttgaaaaaaggaggagggaaaacaaatttgagaggaaaagacaatgtagagatgcatcataaatgtaaaataactgacctaatatgtctatttataattagggtattcttagcttattatttatcctattttttttattttattattttataaacaaaaactttattttactttccatcaaatgaataaataaaatataatttttattttttaagaacatatatttattttagttaccttaaaactattattttaattaataaaattatttctctttatttatttaattacaaaattttcattatttttctaaaactctatttatttttaagtaatttttttttaattttttttaaaaaaattgggtgttacagttgcactaacccctctagtttgaaaaatattacacgagactcctctaaaggaggttattgtataattttacaaagtctcccgataggtattgtaatttactcaaacacgaatggctactttatctatttatttgtttatttcacaataacgtcatgtcatgcgaacgaccatttaactaacgtgaatactgaatggtgctagcaccagctattggttctagcacttatgctctcgaatttgtctaattagctccaatggtccattttacagcttctcccacttgaaagaatatgattcatttcaaaagaaatcacatagttccctactactttgttaatctctctatatattccaatttttcaaccagtttaccatcatccaaagtccaaaacatttaaagaaaccttggactccccagccagaagaagaaccaacatggcacccacaatctataatttttcgtattctaaaaggttttcagagtcattcaattcttcaacatcaaaaaaggagtcatccagttccaacatccttgctttccactccatagctcaatggaatgctcattataaagccaccaaagaaactaacaagctggtatgtttgtgtagctgcactcttttttaactatcataatcaactggtaagttggtttttctaatacagtctttctttggtgtagatggtacttgatttcacagccacatggtgtggaccttgcaaactcatggaccctgttatcctagagtttgctggaaattacacagatgttgagttcatcaagattgatgtggaggagttaacggtatgtcactcattccccttaacctagtttgttagttattgtaaaagcaacatgaagtgtgctaggaacatactctaacacacttattcatacacattctctttgattggttaaagttgaaatatgcaaaatcacaagagaattattaaatataatgtgaaacttacaaaattttgtcatattcaataaattttaatgtgttcaaaagagtgtctcaaaaagaatattattatttgccagcattcctcatgcaacatacataatatataaatgatattctttttttttgtgataattgattttcaccacttgagaactgattttaattcttggtataaatgataacaggaagtgtctcaagcactccaggtccaccaattgccaacattcgtactcgttcagaaaggcaaagttgctgatagagtggtgggggtgaagaaggaggagctgaaaaggtcgattgagaagcacataaaataaataaatatgattatgcactgtaataaaatcaaaatgctcaacaaccaattcaagaaaaaaaaaaaactaccaacaactgaggttgcaataagttggtgtcctcatcattttcacccaatgagaagatatatgtgtcattcttttaccattacactttacaagtatgcaatgtaatatgacacgtgtagttgctcatgtttaatatacaagggcatctattaacatatatcaatattattggcctgttttgggtttattttactcttcccatcaaaatctcaaaccaatcaattttattgttggccacctaatatagttctctcttagaagggaaaaaaacagagaaataatactctaactgtcaacttaagaagaggttctgtaaaataaaaggcaaaatatgaaatgatgggaccaaaacgaatggacattgatacatgaaagattctcacttaataatgaaatatcttcagataagtcaatttcaagctaatcacatcataacaaacaagacaactctatttaaatgaaaccagtcaatgcacagataaccatagttctatttctttttcctttaatctaaaacagcagagtaaaattactaaaactgtaaaaatattgatatagacttgtttacaaagctacatcatgcttcatatatggtagcagtagcaactatgctaggtataatttgtaatatgcacaaacttcttatagataagtggaattacttttaagttatttacagtgtaaactgatcttcatgtgaaagaggatgttaatggatagttacagccattaattggcttagtaatcaacatcactgagaatccttttcagatcatacttctgttgtgtggtcagccttgatggaaacataacatcaaacatgattctgaggtttcctttcttgccaggttcctttgagatgggcatgccttcatttgggaccaccagctcatagccaggtttcacaatatcagccactttgattgtgagatctcttccatccaaagtagtcaagttgagagtctttcctgtgagagcatccacaagtaatatcttatgcatcactacaagatcatttccatccctcttgaaaatagcatgaggcttctcatccaactcaaaaattagatcagatggagcaaatcctggttcttggttgcctttcccaggaaaagttatttttgtgcccttcttccaaccaggctttatgtctatcttcaagatttcttctacagaccttaactctctgccaaaacaaaaaaaaagaaaaaagagggctcctagtgaacttgaaatgaggaggcaaaaatgaaaaatatatatgctccaaattttatgttgttgatacaaatttgatccaaatagccaagttcaacaggaaataagcatacaccaaagaaacatattttacataacacaagcctgatattcacacaaaccaatgaaacatatttttcatactagtaacacatgacatcaagggggcaaacgcaaatccccaaaacaattaaatttcaccttcctttcttcacttgtgggcacagaatacagatatatgtttaggtatgcgtgactgcacaaaagtgcatgatcaagcaaagtaagcgttaagccaaaagaaaaaacctaccaaaacatgataatgactaccaaacaaaatgacagacacccaaggcatggccaaggggtcaacccaattcccatgtaaactatcctagatttaaggtacaaaaaaaatcatattttctttaataattccatactagcagcaaattttcattttgttttggtacatagccttgaagtcaacacagacttgcgatgttaattaatgacactagttgtatgtatctctcaatggtaggcaaggataaagttagaagggaggaaggagagatcgggtcccatctgacatttttaccaaaaaaaaactaacatattaacatttgtcaataatatatatatatatatatataatcaacataaactacctctgaaatttcaattctgattggaaaaaggcaccaacctacctaagaatcagtatctaaattttgtccacagaattctgcaccttaattttacaacaaaaaacataaacctctacatgcaatgaactaattagaacagcatggattagttaattacccgaattcatcaggaacaatccttgagaccttcaacttctttttgcaaccgttgtaaagctcttcaagggtacaaagcaagctgctttcaaccacccctgcatccttcatgttcccatagccatattccttggtgaagcgttgagagttaaggggatagtgaccgtacaagtcatagatctggcgcttctttgggtcactaagcacatcataggcctcagaaacttgtttaaacttggcctcaaactcttctttcctaagagggtcttcaaggttcttatctgggtgccatttcattgccaatttcttataagccttcttcacttcttcatcagtggcatcatgcttcaccttcagtattttgtagtagtcaccagcacccatgttaatgaagcacgaactaaagctgagttctgcgtgaaaatcagtgctttatgaggggaagagactttgtgtgcttttgtcaatgactttgtttaagtggctgcaaaagggtaggtaggtagtagcggaaatcacgctttggaacagatttaagaggagaagataaacactgaaacagcactctgacgcgtactttcagtttttttggattttgatttttcttttttcgtattatagttaagaaaacagttgctatcgctaatgctagttgatgctatgacagcatgtgcagcaaaaatgtctccaatacacggataatggtaaattagtaatataatggcaacttggtaagtcaaattaatattgaaataatcttagggatgaaggagtgtaagaaggtctcaaagtattttcatgtatgaaagtcatttatttaggagaatttgtatttgatttttttattatacgtaaaattttcttaaattaacggtaaccaggtgcatcacacagccagtctctgatctcaggaaaaaaaaataaaattaaaattgtcttatatttgttatacagagaatgaccaggagtaacagcatggtttatcattatgattgaattttttctctctcagtattatcgattttgcttttcctttttatttcagggaagcttctcggaaatatctagtgtagcttttacgcattgaatgattgcagactgcagtatagaataattttgatttgaactgtaaggcaaatatagtacttttttattttattttgtacattttctatgagcagataaatctcataatttaatcattcaatttcttaaattgagacttttttataagaaaatatattaaagtatctggacgtacagatgtacgttgtttgagatagacagacatttcctaatattaaagatagttaaatgaaggactgacaagaaagaattgagtcaactatttttttttcacatactatttctgcccttctatacaaaatattgtataaaattaaattataattagtcggcagtcgtaagggtacacgttttactttggaatttcttttcttattgacctagttttccttgtagtgctctacaataaatttaaaatatttcttttattatagattaattgaatttatttttaaactatgttttagtatgtcagaaagtcagtaaaaaaattaatatggcagaaagaattctgatccattgaaattttaactcaataaacttatcatacggtcagtacataaccttttctttttaatacttcaacattataattacaacaaatgatatgaatattataagatgtttaaaggaaacttttagcataaatgtagtaaaaatattgattaaaccataatttgataactacggtctgtatataaaaaaaaaaaacctaatttgacacagaatccttatgaaatcaaactaaataaaaatattataatattgtgtagaaaaatgtaatttagtaaaacaaattaaaaaaatcacctgaaataggataacttcttaaaattgtcaacaatacggctctagtttgcataaaattttcaacaaatatttataagaaaataaaataaagagataaaa

SEQ ID NO: 208 - DNA, 4622 bp, Glycine max
  source 1..4622: mol_type = genomic DNA
ctccaatctttaaagtctaatattaaaataaatggcattttaaatcttaatgattaatttctttgaataaaaataaaatgtaaataaataaacaaaataaataaaaataatgttagacttggcaattttagcctaacttaattagttgacctgaacaaaccataattagaacttatataattctaaatatgtagtcccaaaaaggacatgaatatataggtttaatttgatgggacctattgggctaggttgggctagtaaaatattgactcggtcttataagttattatgttatatttttttatcaatttatatatgtttctttagaaatttgtatattaaatatatttaattttgattgtttatttatttttaattagcgataatttgatacttggcttgttggcctgattcgagctagttaccctatgaggtgacatgaagcgctcacggttactatgacggttagcttcacgactgttggtggcagtagcgtacgacttagctatagttccggacttaccataacttcgtatagcatacattatacgaagttatatcaggatattcttgtttaagatgttgaactctatggaggtttgtatgaactgatgatctaggaccggataagttcccttcttcatagcgaacttattcaaagaatgttttgtgtatcattcttgttacattgttattaatgaaaaaatattattggtcattggactgaacacgagtgttaaatatggaccaggccccaaataagatccattgatatatgaattaaataacaagaataaatcgagtcaccaaaccacttgccttttttaacgagacttgttcaccaacttgatacaaaagtcattatcctatgcaaatcaataatcatacaaaaatatccaataacactaaaaaattaaaagaaatggataatttcacaatatgttatacgataaagaagttacttttccaagaaattcactgattttataagcccacttgcattagataaatggcaaaaaaaaacaaaaaggaaaagaaataaagcacgaagaattctagaaaatacgaaatacgcttcaatgcagtgggacccacggttcaattattgccaattttcagctccaccgtatatttaaaaaataaaacgataatgctaaaaaaatataaatcgtaacgatcgttaaatctcaacggctggatcttatgacgaccgttagaaattgtggttgtcgacgagtcagtaataaacggcgtcaaagtggttgcagccggcacacacgagtcgtgtttatcaactcaaagcacaaatacttttcctcaacctaaaaataaggcaattagccaaaaacaactttgcgtgtaaacaacgctcaatacacgtgtcattttattattagctattgcttcaccgccttagctttctcgtgacctagtcgtcctcgtcttttcttcttcttcttctataaaacaatacccaaagagctcttcttcttcacaattcagatttcaatttctcaaaatcttaaaaactttctctcaattctctctaccgtgatcaaggtaaatttctgtgttccttattctctcaaaatcttcgattttgttttcgttcgatcccaatttcgtatatgttctttggtttagattctgttaatcttagatcgaagacgattttctgggtttgatcgttagatatcatcttaattctcgattagggtttcatagatatcatccgatttgttcaaataatttgagttttgtcgaataattactcttcgatttgtgatttctatctagatctggtgttagtttctagtttgtgcgatcgaatttgtcgattaatctgagtttttctgattaacaggtcgactttaacttagcctagcgaagttcctattccgaagttcctattctctagaaagtataggaacttcagatccaccgggatccccgatcatgcagaagctcatcaactctgtgcagaactacgcctggggctctaagaccgccttgaccgagttgtacgggatggagaacccttcctcacagcctatggccgagttgtggatgggtgctcaccctaagtcctcctccagagtgcagaacgctgctggagacattgtctccctcagagacgtgatcgagtccgacaagtccaccctgctgggagaggccgtcgctaagagattcggtgagttgcccttcttgttcaaggtcctctgcgctgctcagcccttgtctatccaagtgcaccctaacaagcacaactccgagatcggattcgccaaggagaacgctgctggcatccctatggacgcagctgagcgtaactacaaagaccctaaccacaagcccgagttggtgttcgctctcacccctttcttggccatgaacgctttccgcgagttctctgagattgtgtcactcctccagcccgttgctggtgctcaccctgctatcgctcacttcttgcagcagcctgacgctgagaggctctcagagctgttcgcttccctcctcaacatgcaaggcgaagagaagtccagagccctcgccatcctgaagtctgccctcgactctcagcagggagagccctggcagactattcgcctgatttccgagttctacccagaggactccgggttgttctctcccttgttgctcaacgtggtgaagctgaacccaggcgaggccatgttcttgttcgccgagactcctcacgcctacctccaaggagtggccctggaggtcatggccaactctgacaacgtccttagagctggccttactcctaaatacatcgacattcccgagctggtggccaacgtgaagttcgaggccaagcctgctaaccagttgctcacccagcccgttaagcagggagctgaactcgacttccctatccctgttgacgacttcgccttctccttgcacgacctctctgacaaggagactaccatatcccagcagtccgctgctatcctgttctgcgtggagggagacgctaccctgtggaaaggatctcagcagcttcagctgaagcctggagagtcagctttcattgctgccaacgagtcacctgtgactgtgaagggccacgggaggctcgccagagtctacaacaagttgtagaaacttatctctgttatgaatcagaagaagttcatgtctcgtttcatttaaaactttggtggtttgtgttttggggccttgtaaagcccctgatgaataattgttcaactatgtttccgttcctgtgttatacctttctttctaatgagtaatgacatcaaacttcttctgtattgaaattatgtccttgtgagtctctttatcatcgtttcgtctttacattatatgtgctacttttgtctaatgagcctgaaaagtggctccaatggtacgcactggaagatttgttggcttctggtagatatagcgacagtgttgagcttgtaatatcatgtctcttattgctaaattagttcctttcttaacagaaaccttcaaagtttttgtttttgttttcatttacctaatgtacacatacgctggccatgactaacaacatgtccaggcttagagcatatttttttctagcttaaattgttaacttgtcattcagtaaaatccgagaattgtgaagctctaattgaagctaattcgttttataaagtcagttaaaaagtatactaaattatccaacttttcttcaaaatctcaaaattctatgacaaaacgatagtctttgtttatgtcagtaccacaaagaggtggaaaaaaacaccaaaaaaacaataagcaaactatacactgagaagaaaaataaaagagagctcaatagatgttttatactaacggtagattagatcaaagatccaagctttactctacatagagcagaacccagaatcccttcatatctcttttattctagcaccgataatctactgaaaagaagacacttagagctctgtctctttgtcaaagaagtcccagccgtcatccagaagctccttacgttcattaacagatcccagccgtcatccagaagctccttacgttcattaacagagaagttcctattccgaagttcctattcttcaaaaagtataggaacttctgattccgatgacttcgtaggttcctagctcaagccgctcgtgtccaagcgtcacttacgattagctaatgattacggcatctaggaccgactagatagggctagggtggaccacaaaaattataatcgtaccgagacaacctgatttacaccctctaaattgaaatatgtgataaaatagaaatgaaaagtttgagtcctcacttttattcaggtaattaaaatgaaataaaaattaagagacaataactcatttctatgttaaaaatcgtcataggacaatgtcatattttgagttatgcttatcggtttgagatgctttgtgtcattaaaaagcttagagaaaaatttataacttatatcactactgtgtaaatctaaattaactattatcttgttaaaaaataactaaaaagtaggctattttatcattgtaagaactcgtgtgccatattccttttgctctcttcttccattctcttcctttcacttttttctg

SEQ ID NO: 209 - DNA, 4666 bp, Glycine max
  source 1..4666: mol_type = genomic DNA
gagtcacatgcatgagcagtcaaatagtaaaatcgatccgattatgtaattggattccgattgaaccggttgagctcaccagaccgaaccgaataactaaggtttatattctttaagttatatatttttttatttaatgtataatatattttttttgcggttaggattttctacagacacttttttgacaatagagaatctatcacaagaacaaattatattcaatatgaaatacttctccttgatatgcttaattataacatgaagatgaaaccaaatcatgattttgataaaaaaacaaaaacaaaaacaaaaataaaatctttatgaatggttaggctatatatcttcaagagttgacacacatagacctagggcccatgaagcattctcagttctcaacgttgctgtccagttcccagcttcgagctagttaccctatgaggtgacatgaagcgctcacggttactatgacggttagcttcacgactgttggtggcagtagcgtacgacttagctatagttccggacttaccataacttcgtatagcatacattatacgaagttatatcaggatattcttgtttaagatgttgaactctatggaggtttgtatgaactgatgatctaggaccggataagttcccttcttcatagcgaacttattcaaagaatgttttgtgtatcattcttgttacattgttattaatgaaaaaatattattggtcattggactgaacacgagtgttaaatatggaccaggccccaaataagatccattgatatatgaattaaataacaagaataaatcgagtcaccaaaccacttgccttttttaacgagacttgttcaccaacttgatacaaaagtcattatcctatgcaaatcaataatcatacaaaaatatccaataacactaaaaaattaaaagaaatggataatttcacaatatgttatacgataaagaagttacttttccaagaaattcactgattttataagcccacttgcattagataaatggcaaaaaaaaacaaaaaggaaaagaaataaagcacgaagaattctagaaaatacgaaatacgcttcaatgcagtgggacccacggttcaattattgccaattttcagctccaccgtatatttaaaaaataaaacgataatgctaaaaaaatataaatcgtaacgatcgttaaatctcaacggctggatcttatgacgaccgttagaaattgtggttgtcgacgagtcagtaataaacggcgtcaaagtggttgcagccggcacacacgagtcgtgtttatcaactcaaagcacaaatacttttcctcaacctaaaaataaggcaattagccaaaaacaactttgcgtgtaaacaacgctcaatacacgtgtcattttattattagctattgcttcaccgccttagctttctcgtgacctagtcgtcctcgtcttttcttcttcttcttctataaaacaatacccaaagagctcttcttcttcacaattcagatttcaatttctcaaaatcttaaaaactttctctcaattctctctaccgtgatcaaggtaaatttctgtgttccttattctctcaaaatcttcgattttgttttcgttcgatcccaatttcgtatatgttctttggtttagattctgttaatcttagatcgaagacgattttctgggtttgatcgttagatatcatcttaattctcgattagggtttcatagatatcatccgatttgttcaaataatttgagttttgtcgaataattactcttcgatttgtgatttctatctagatctggtgttagtttctagtttgtgcgatcgaatttgtcgattaatctgagtttttctgattaacaggtcgactttaacttagcctagcgaagttcctattccgaagttcctattctctagaaagtataggaacttcagatccaccgggatccccgatcatgcagaagctcatcaactctgtgcagaactacgcctggggctctaagaccgccttgaccgagttgtacgggatggagaacccttcctcacagcctatggccgagttgtggatgggtgctcaccctaagtcctcctccagagtgcagaacgctgctggagacattgtctccctcagagacgtgatcgagtccgacaagtccaccctgctgggagaggccgtcgctaagagattcggtgagttgcccttcttgttcaaggtcctctgcgctgctcagcccttgtctatccaagtgcaccctaacaagcacaactccgagatcggattcgccaaggagaacgctgctggcatccctatggacgcagctgagcgtaactacaaagaccctaaccacaagcccgagttggtgttcgctctcacccctttcttggccatgaacgctttccgcgagttctctgagattgtgtcactcctccagcccgttgctggtgctcaccctgctatcgctcacttcttgcagcagcctgacgctgagaggctctcagagctgttcgcttccctcctcaacatgcaaggcgaagagaagtccagagccctcgccatcctgaagtctgccctcgactctcagcagggagagccctggcagactattcgcctgatttccgagttctacccagaggactccgggttgttctctcccttgttgctcaacgtggtgaagctgaacccaggcgaggccatgttcttgttcgccgagactcctcacgcctacctccaaggagtggccctggaggtcatggccaactctgacaacgtccttagagctggccttactcctaaatacatcgacattcccgagctggtggccaacgtgaagttcgaggccaagcctgctaaccagttgctcacccagcccgttaagcagggagctgaactcgacttccctatccctgttgacgacttcgccttctccttgcacgacctctctgacaaggagactaccatatcccagcagtccgctgctatcctgttctgcgtggagggagacgctaccctgtggaaaggatctcagcagcttcagctgaagcctggagagtcagctttcattgctgccaacgagtcacctgtgactgtgaagggccacgggaggctcgccagagtctacaacaagttgtagaaacttatctctgttatgaatcagaagaagttcatgtctcgtttcatttaaaactttggtggtttgtgttttggggccttgtaaagcccctgatgaataattgttcaactatgtttccgttcctgtgttatacctttctttctaatgagtaatgacatcaaacttcttctgtattgaaattatgtccttgtgagtctctttatcatcgtttcgtctttacattatatgtgctacttttgtctaatgagcctgaaaagtggctccaatggtacgcactggaagatttgttggcttctggtagatatagcgacagtgttgagcttgtaatatcatgtctcttattgctaaattagttcctttcttaacagaaaccttcaaagtttttgtttttgttttcatttacctaatgtacacatacgctggccatgactaacaacatgtccaggcttagagcatatttttttctagcttaaattgttaacttgtcattcagtaaaatccgagaattgtgaagctctaattgaagctaattcgttttataaagtcagttaaaaagtatactaaattatccaacttttcttcaaaatctcaaaattctatgacaaaacgatagtctttgtttatgtcagtaccacaaagaggtggaaaaaaacaccaaaaaaacaataagcaaactatacactgagaagaaaaataaaagagagctcaatagatgttttatactaacggtagattagatcaaagatccaagctttactctacatagagcagaacccagaatcccttcatatctcttttattctagcaccgataatctactgaaaagaagacacttagagctctgtctctttgtcaaagaagtcccagccgtcatccagaagctccttacgttcattaacagatcccagccgtcatccagaagctccttacgttcattaacagagaagttcctattccgaagttcctattcttcaaaaagtataggaacttctgattccgatgacttcgtaggttcctagctcaagccgctcgtgtccaagcgtcacttacgattagctaatgattacggcatctaggaccgactagctctgtgcctgcagtccgagtaccctacgaccaaggcccagcatgtttttaaaatgttggagttggagatgctattatataaaatgtttggtaaaggtatgttttcaaaattgtaatggtgattgagtttgtttggatttaagttggaaatataaacacacaatagataatagtaagttaaaagtataataattttataaccgtacgtttgtaatcttgtgtccaaacacatctagaattggtcaagtggcaaagtctggcgtgcgtaggtgcaactctttacgcacggtgccacagtgtttcttaaagccttggatgtaatactaaaataattaacggtacagatcgtacatgtgtaacatgtagaaaagacattcaataacaagctttttttaagagtcttcaattttctctctgatccttccccttcttcatg

SEQ ID NO: 210 - DNA, 4620 bp, Glycine max
  source 1..4620: mol_type = genomic DNA
tgcaatggatttaatcatcaatgaatattaattatgaaattttaattatttttttaaagtttaaaaacattccaaaggaataaggtgtcaaagtgagtccaatcagttcacctaaaaaatcagtcttttgtcttgctatgttcacattgacaattctttacagacgaagaaatgttaaaaaaaatttcttactttccaaataaatcttcttacatctatatataaacattgatttacatacaaataggatttaattttttttcaaaattaaaatttttgttactttttatggttgaataagttgaaattttaggaatttaaagaattttgaaaaagagttactaataagaaaattgaaaaaaaaatctcacattaaagttttttattcttttttgggccatgttcgagctagttaccctatgaggtgacatgaagcgctcacggttactatgacggttagcttcacgactgttggtggcagtagcgtacgacttagctatagttccggacttaccataacttcgtatagcatacattatacgaagttatatcaggatattcttgtttaagatgttgaactctatggaggtttgtatgaactgatgatctaggaccggataagttcccttcttcatagcgaacttattcaaagaatgttttgtgtatcattcttgttacattgttattaatgaaaaaatattattggtcattggactgaacacgagtgttaaatatggaccaggccccaaataagatccattgatatatgaattaaataacaagaataaatcgagtcaccaaaccacttgccttttttaacgagacttgttcaccaacttgatacaaaagtcattatcctatgcaaatcaataatcatacaaaaatatccaataacactaaaaaattaaaagaaatggataatttcacaatatgttatacgataaagaagttacttttccaagaaattcactgattttataagcccacttgcattagataaatggcaaaaaaaaacaaaaaggaaaagaaataaagcacgaagaattctagaaaatacgaaatacgcttcaatgcagtgggacccacggttcaattattgccaattttcagctccaccgtatatttaaaaaataaaacgataatgctaaaaaaatataaatcgtaacgatcgttaaatctcaacggctggatcttatgacgaccgttagaaattgtggttgtcgacgagtcagtaataaacggcgtcaaagtggttgcagccggcacacacgagtcgtgtttatcaactcaaagcacaaatacttttcctcaacctaaaaataaggcaattagccaaaaacaactttgcgtgtaaacaacgctcaatacacgtgtcattttattattagctattgcttcaccgccttagctttctcgtgacctagtcgtcctcgtcttttcttcttcttcttctataaaacaatacccaaagagctcttcttcttcacaattcagatttcaatttctcaaaatcttaaaaactttctctcaattctctctaccgtgatcaaggtaaatttctgtgttccttattctctcaaaatcttcgattttgttttcgttcgatcccaatttcgtatatgttctttggtttagattctgttaatcttagatcgaagacgattttctgggtttgatcgttagatatcatcttaattctcgattagggtttcatagatatcatccgatttgttcaaataatttgagttttgtcgaataattactcttcgatttgtgatttctatctagatctggtgttagtttctagtttgtgcgatcgaatttgtcgattaatctgagtttttctgattaacaggtcgactttaacttagcctagcgaagttcctattccgaagttcctattctctagaaagtataggaacttcagatccaccgggatccccgatcatgcagaagctcatcaactctgtgcagaactacgcctggggctctaagaccgccttgaccgagttgtacgggatggagaacccttcctcacagcctatggccgagttgtggatgggtgctcaccctaagtcctcctccagagtgcagaacgctgctggagacattgtctccctcagagacgtgatcgagtccgacaagtccaccctgctgggagaggccgtcgctaagagattcggtgagttgcccttcttgttcaaggtcctctgcgctgctcagcccttgtctatccaagtgcaccctaacaagcacaactccgagatcggattcgccaaggagaacgctgctggcatccctatggacgcagctgagcgtaactacaaagaccctaaccacaagcccgagttggtgttcgctctcacccctttcttggccatgaacgctttccgcgagttctctgagattgtgtcactcctccagcccgttgctggtgctcaccctgctatcgctcacttcttgcagcagcctgacgctgagaggctctcagagctgttcgcttccctcctcaacatgcaaggcgaagagaagtccagagccctcgccatcctgaagtctgccctcgactctcagcagggagagccctggcagactattcgcctgatttccgagttctacccagaggactccgggttgttctctcccttgttgctcaacgtggtgaagctgaacccaggcgaggccatgttcttgttcgccgagactcctcacgcctacctccaaggagtggccctggaggtcatggccaactctgacaacgtccttagagctggccttactcctaaatacatcgacattcccgagctggtggccaacgtgaagttcgaggccaagcctgctaaccagttgctcacccagcccgttaagcagggagctgaactcgacttccctatccctgttgacgacttcgccttctccttgcacgacctctctgacaaggagactaccatatcccagcagtccgctgctatcctgttctgcgtggagggagacgctaccctgtggaaaggatctcagcagcttcagctgaagcctggagagtcagctttcattgctgccaacgagtcacctgtgactgtgaagggccacgggaggctcgccagagtctacaacaagttgtagaaacttatctctgttatgaatcagaagaagttcatgtctcgtttcatttaaaactttggtggtttgtgttttggggccttgtaaagcccctgatgaataattgttcaactatgtttccgttcctgtgttatacctttctttctaatgagtaatgacatcaaacttcttctgtattgaaattatgtccttgtgagtctctttatcatcgtttcgtctttacattatatgtgctacttttgtctaatgagcctgaaaagtggctccaatggtacgcactggaagatttgttggcttctggtagatatagcgacagtgttgagcttgtaatatcatgtctcttattgctaaattagttcctttcttaacagaaaccttcaaagtttttgtttttgttttcatttacctaatgtacacatacgctggccatgactaacaacatgtccaggcttagagcatatttttttctagcttaaattgttaacttgtcattcagtaaaatccgagaattgtgaagctctaattgaagctaattcgttttataaagtcagttaaaaagtatactaaattatccaacttttcttcaaaatctcaaaattctatgacaaaacgatagtctttgtttatgtcagtaccacaaagaggtggaaaaaaacaccaaaaaaacaataagcaaactatacactgagaagaaaaataaaagagagctcaatagatgttttatactaacggtagattagatcaaagatccaagctttactctacatagagcagaacccagaatcccttcatatctcttttattctagcaccgataatctactgaaaagaagacacttagagctctgtctctttgtcaaagaagtcccagccgtcatccagaagctccttacgttcattaacagatcccagccgtcatccagaagctccttacgttcattaacagagaagttcctattccgaagttcctattcttcaaaaagtataggaacttctgattccgatgacttcgtaggttcctagctcaagccgctcgtgtccaagcgtcacttacgattagctaatgattacggcatctaggaccgactagtgcaatcacgggccttgtacatgcagtctcacccaaaaagacgccagggcatcttgcaatcataacaacaattatttaatattgaatgatatatattataaattttttaggtgcatgattactaaactatattctaaacctcacttacatataatatcacataataattttaaaatattgaggtttctgtaagtataaactaatatactataataattaaggttatagttgagaataccaactaaaaagctaataaaaagtgaaaaaattagctgataactaaaaactaaaatttggtagctaaaatctattaaattagtttaattattaaatgataattagtatccaataaaattacttattggaataactggaaatataaaatgataaaaatagacatatttatatgat

SEQ ID NO: 211 - DNA, 4646 bp, Glycine max
  source 1..4646: mol_type = genomic DNA
catgtggttgtttgggattcttcaaccgatgtaaatcccatcgatgtagtaagtcaggattttttaaatggcttataaaataatcaatgttaaatgttctcctcagacctgcttcaacaatcaaatcttagtactcaatgagacccacatactcctctaatctcacaccaaatttggagcacattccacagatccagccacagccactacactatccatcatcatgaacctagacgaaagaacggattcattgtgactatatatgtgggtttcgaatatatagcattttcgtaccaatatgcattgtgcggtttcggaattaacattcttttttctctttcctttgctttcttatcctgattttctttttggataccattttcgctttataccatccgtattcgagctagttaccctatgaggtgacatgaagcgctcacggttactatgacggttagcttcacgactgttggtggcagtagcgtacgacttagctatagttccggacttaccataacttcgtatagcatacattatacgaagttatatcaggatattcttgtttaagatgttgaactctatggaggtttgtatgaactgatgatctaggaccggataagttcccttcttcatagcgaacttattcaaagaatgttttgtgtatcattcttgttacattgttattaatgaaaaaatattattggtcattggactgaacacgagtgttaaatatggaccaggccccaaataagatccattgatatatgaattaaataacaagaataaatcgagtcaccaaaccacttgccttttttaacgagacttgttcaccaacttgatacaaaagtcattatcctatgcaaatcaataatcatacaaaaatatccaataacactaaaaaattaaaagaaatggataatttcacaatatgttatacgataaagaagttacttttccaagaaattcactgattttataagcccacttgcattagataaatggcaaaaaaaaacaaaaaggaaaagaaataaagcacgaagaattctagaaaatacgaaatacgcttcaatgcagtgggacccacggttcaattattgccaattttcagctccaccgtatatttaaaaaataaaacgataatgctaaaaaaatataaatcgtaacgatcgttaaatctcaacggctggatcttatgacgaccgttagaaattgtggttgtcgacgagtcagtaataaacggcgtcaaagtggttgcagccggcacacacgagtcgtgtttatcaactcaaagcacaaatacttttcctcaacctaaaaataaggcaattagccaaaaacaactttgcgtgtaaacaacgctcaatacacgtgtcattttattattagctattgcttcaccgccttagctttctcgtgacctagtcgtcctcgtcttttcttcttcttcttctataaaacaatacccaaagagctcttcttcttcacaattcagatttcaatttctcaaaatcttaaaaactttctctcaattctctctaccgtgatcaaggtaaatttctgtgttccttattctctcaaaatcttcgattttgttttcgttcgatcccaatttcgtatatgttctttggtttagattctgttaatcttagatcgaagacgattttctgggtttgatcgttagatatcatcttaattctcgattagggtttcatagatatcatccgatttgttcaaataatttgagttttgtcgaataattactcttcgatttgtgatttctatctagatctggtgttagtttctagtttgtgcgatcgaatttgtcgattaatctgagtttttctgattaacaggtcgactttaacttagcctagcgaagttcctattccgaagttcctattctctagaaagtataggaacttcagatccaccgggatccccgatcatgcagaagctcatcaactctgtgcagaactacgcctggggctctaagaccgccttgaccgagttgtacgggatggagaacccttcctcacagcctatggccgagttgtggatgggtgctcaccctaagtcctcctccagagtgcagaacgctgctggagacattgtctccctcagagacgtgatcgagtccgacaagtccaccctgctgggagaggccgtcgctaagagattcggtgagttgcccttcttgttcaaggtcctctgcgctgctcagcccttgtctatccaagtgcaccctaacaagcacaactccgagatcggattcgccaaggagaacgctgctggcatccctatggacgcagctgagcgtaactacaaagaccctaaccacaagcccgagttggtgttcgctctcacccctttcttggccatgaacgctttccgcgagttctctgagattgtgtcactcctccagcccgttgctggtgctcaccctgctatcgctcacttcttgcagcagcctgacgctgagaggctctcagagctgttcgcttccctcctcaacatgcaaggcgaagagaagtccagagccctcgccatcctgaagtctgccctcgactctcagcagggagagccctggcagactattcgcctgatttccgagttctacccagaggactccgggttgttctctcccttgttgctcaacgtggtgaagctgaacccaggcgaggccatgttcttgttcgccgagactcctcacgcctacctccaaggagtggccctggaggtcatggccaactctgacaacgtccttagagctggccttactcctaaatacatcgacattcccgagctggtggccaacgtgaagttcgaggccaagcctgctaaccagttgctcacccagcccgttaagcagggagctgaactcgacttccctatccctgttgacgacttcgccttctccttgcacgacctctctgacaaggagactaccatatcccagcagtccgctgctatcctgttctgcgtggagggagacgctaccctgtggaaaggatctcagcagcttcagctgaagcctggagagtcagctttcattgctgccaacgagtcacctgtgactgtgaagggccacgggaggctcgccagagtctacaacaagttgtagaaacttatctctgttatgaatcagaagaagttcatgtctcgtttcatttaaaactttggtggtttgtgttttggggccttgtaaagcccctgatgaataattgttcaactatgtttccgttcctgtgttatacctttctttctaatgagtaatgacatcaaacttcttctgtattgaaattatgtccttgtgagtctctttatcatcgtttcgtctttacattatatgtgctacttttgtctaatgagcctgaaaagtggctccaatggtacgcactggaagatttgttggcttctggtagatatagcgacagtgttgagcttgtaatatcatgtctcttattgctaaattagttcctttcttaacagaaaccttcaaagtttttgtttttgttttcatttacctaatgtacacatacgctggccatgactaacaacatgtccaggcttagagcatatttttttctagcttaaattgttaacttgtcattcagtaaaatccgagaattgtgaagctctaattgaagctaattcgttttataaagtcagttaaaaagtatactaaattatccaacttttcttcaaaatctcaaaattctatgacaaaacgatagtctttgtttatgtcagtaccacaaagaggtggaaaaaaacaccaaaaaaacaataagcaaactatacactgagaagaaaaataaaagagagctcaatagatgttttatactaacggtagattagatcaaagatccaagctttactctacatagagcagaacccagaatcccttcatatctcttttattctagcaccgataatctactgaaaagaagacacttagagctctgtctctttgtcaaagaagtcccagccgtcatccagaagctccttacgttcattaacagatcccagccgtcatccagaagctccttacgttcattaacagagaagttcctattccgaagttcctattcttcaaaaagtataggaacttctgattccgatgacttcgtaggttcctagctcaagccgctcgtgtccaagcgtcacttacgattagctaatgattacggcatctaggaccgactagggagcttttgttcccagctttcaggaattgatgccatgcaaggaccatatctagattttggaaagcaccatttagattttacagctaaaagaaatttcgccaagttgatcagtgacaaaacaatccagtcttatattcccttttgctgacaacttaactctgaatgaattaaaatcttataacaagaagttgctactaattgatttatataaaaataagaacatcagttatatatttttttatcagtagaacagcagttatatatatttttgaaaaaataaaataaaatatttacgataactaatataattcattgctctaaatactaaagtatataataaatggttctttttctgtcttttgtgatattaagggttttttttttgtaaaaatatgataattattgtattctataatataagtaaacaatgaacacaac

SEQ ID NO: 212 - DNA, 24 bp, Glycine max
  source 1..24: mol_type = genomic DNA
acaagctgacttattcccttttcc

SEQ ID NO: 213 - DNA, 24 bp, Glycine max
  source 1..24: mol_type = genomic DNA
ctaaccgtcatagtaaccgtgagc

SEQ ID NO: 214 - DNA, 18 bp, Glycine max
  source 1..18: mol_type = genomic DNA
ccgggtttccacagaacc

SEQ ID NO: 215 - DNA, 25 bp, Glycine max
  source 1..25: mol_type = genomic DNA
catgtcacctcatagggtaactagc

SEQ ID NO: 216 - DNA, 28 bp, Glycine max
  source 1..28: mol_type = genomic DNA
aagtaatgacaactttattagggttagg

SEQ ID NO: 217 - DNA, 23 bp, Glycine max
  source 1..23: mol_type = genomic DNA
taaccgtcatagtaaccgtgagc

SEQ ID NO: 218 - DNA, 24 bp, Glycine max
  source 1..24: mol_type = genomic DNA
ctttaaaagcatgcacacactagc

SEQ ID NO: 219 - DNA, 24 bp, Glycine max
  source 1..24: mol_type = genomic DNA
ctaaccgtcatagtaaccgtgagc

SEQ ID NO: 220 - DNA, 23 bp, Glycine max
  source 1..23: mol_type = genomic DNA
ccttttgcttttgattttgttcc

SEQ ID NO: 221 - DNA, 24 bp, Glycine max
  source 1..24: mol_type = genomic DNA
ctaaccgtcatagtaaccgtgagc

SEQ ID NO: 222 - DNA, 28 bp, Glycine max
  source 1..28: mol_type = genomic DNA
tttattagccttgtctaaatatcgtacc

SEQ ID NO: 223 - DNA, 24 bp, Glycine max
  source 1..24: mol_type = genomic DNA
ctaaccgtcatagtaaccgtgagc

SEQ ID NO: 224 - DNA, 23 bp, Glycine max
  source 1..23: mol_type = genomic DNA
taacaactttcattgacgtgtcg

SEQ ID NO: 225 - DNA, 25 bp, Glycine max
  source 1..25: mol_type = genomic DNA
catgtcacctcatagggtaactagc

SEQ ID NO: 226 - DNA, 26 bp, Glycine max
  source 1..26: mol_type = genomic DNA
aacaatcttttgtgaagactaaaacc

SEQ ID NO: 227 - DNA, 24 bp, Glycine max
  source 1..24: mol_type = genomic DNA
ctaaccgtcatagtaaccgtgagc

SEQ ID NO: 228 - DNA, 25 bp, Glycine max
  source 1..25: mol_type = genomic DNA
tcaattaaagcttcagattcactcc

SEQ ID NO: 229 - DNA, 25 bp, Glycine max
  source 1..25: mol_type = genomic DNA
catgtcacctcatagggtaactagc

SEQ ID NO: 230 - DNA, 24 bp, Glycine max
  source 1..24: mol_type = genomic DNA
tggtgaacttacagtgacatacgg

SEQ ID NO: 231 - DNA, 25 bp, Glycine max
  source 1..25: mol_type = genomic DNA
catgtcacctcatagggtaactagc

SEQ ID NO: 232 - DNA, 26 bp, Glycine max
  source 1..26: mol_type = genomic DNA
ttttatgtgctgaattaggttactgc

SEQ ID NO: 233 - DNA, 24 bp, Glycine max
  source 1..24: mol_type = genomic DNA
ctaaccgtcatagtaaccgtgagc

SEQ ID NO: 234 - DNA, 29 bp, Glycine max
  source 1..29: mol_type = genomic DNA
cagtcatatagtaagttattgacttttgc

SEQ ID NO: 235 - DNA, 24 bp, Glycine max
  source 1..24: mol_type = genomic DNA
ctaaccgtcatagtaaccgtgagc

SEQ ID NO: 236 - DNA, 29 bp, Glycine max
  source 1..29: mol_type = genomic DNA
gaatattttgtactttacaactgttttcc

SEQ ID NO: 237 - DNA, 24 bp, Glycine max
  source 1..24: mol_type = genomic DNA
ctaaccgtcatagtaaccgtgagc

SEQ ID NO: 238 - DNA, 21 bp, Glycine max
  source 1..21: mol_type = genomic DNA
caagcgtcacttacgattagc

SEQ ID NO: 239 - DNA, 26 bp, Glycine max
  source 1..26: mol_type = genomic DNA
caattttatctgatctatcaggaacc

SEQ ID NO: 240 - DNA, 23 bp, Glycine max
  source 1..23: mol_type = genomic DNA
attccgatgacttcgtaggttcc

SEQ ID NO: 241 - DNA, 24 bp, Glycine max
  source 1..24: mol_type = genomic DNA
acagagaaagtaaaggtgggaagg

SEQ ID NO: 242 - DNA, 21 bp, Glycine max
  source 1..21: mol_type = genomic DNA
caagcgtcacttacgattagc

SEQ ID NO: 243 - DNA, 25 bp, Glycine max
  source 1..25: mol_type = genomic DNA
aacacctcaaagtaaatttttgttc

SEQ ID NO: 244 - DNA, 21 bp, Glycine max
  source 1..21: mol_type = genomic DNA
caagcgtcacttacgattagc

SEQ ID NO: 245 - DNA, 24 bp, Glycine max
  source 1..24: mol_type = genomic DNA
gaaactcaattacgtctcacatgg

SEQ ID NO: 246 - DNA, 23 bp, Glycine max
  source 1..23: mol_type = genomic DNA
attccgatgacttcgtaggttcc

SEQ ID NO: 247 - DNA, 23 bp, Glycine max
  source 1..23: mol_type = genomic DNA
ccctttaatgctagcctgtctcc

SEQ ID NO: 248 - DNA, 23 bp, Glycine max
  source 1..23: mol_type = genomic DNA
attccgatgacttcgtaggttcc

SEQ ID NO: 249 - DNA, 24 bp, Glycine max
  source 1..24: mol_type = genomic DNA
taaaatatgatcaacaaccaatgc

SEQ ID NO: 250 - DNA, 21 bp, Glycine max
  source 1..21: mol_type = genomic DNA
caagcgtcacttacgattagc

SEQ ID NO: 251 - DNA, 23 bp, Glycine max
  source 1..23: mol_type = genomic DNA
atttgcagaagcattattgatgg

SEQ ID NO: 252 - DNA, 23 bp, Glycine max
  source 1..23: mol_type = genomic DNA
attccgatgacttcgtaggttcc

SEQ ID NO: 253 - DNA, 27 bp, Glycine max
  source 1..27: mol_type = genomic DNA
atatctcaaagttcttcctattaatgc

SEQ ID NO: 254 - DNA, 20 bp, Glycine max
  source 1..20: mol_type = genomic DNA
ccgatgacttcgtaggttcc

SEQ ID NO: 255 - DNA, 24 bp, Glycine max
  source 1..24: mol_type = genomic DNA
tgcattaatatcaaatgagtttgc

SEQ ID NO: 256 - DNA, 25 bp, Glycine max
  source 1..25: mol_type = genomic DNA
tcatttacctaatgtacacatacgc

SEQ ID NO: 257 - DNA, 28 bp, Glycine max
  source 1..28: mol_type = genomic DNA
tgggactctttatctaagtttattaggg

SEQ ID NO: 258 - DNA, 27 bp, Glycine max
  source 1..27: mol_type = genomic DNA
tttcatttacctaatgtacacatacgc

SEQ ID NO: 259 - DNA, 23 bp, Glycine max
  source 1..23: mol_type = genomic DNA
ctgaacctggtcatagtctaggg

SEQ ID NO: 260 - DNA, 21 bp, Glycine max
  source 1..21: mol_type = genomic DNA
caagcgtcacttacgattagc

SEQ ID NO: 261 - DNA, 25 bp, Glycine max
  source 1..25: mol_type = genomic DNA
agacaaatgacagtattttcctagc

SEQ ID NO: 262 - DNA, 21 bp, Glycine max
  source 1..21: mol_type = genomic DNA
caagcgtcacttacgattagc

SEQ ID NO: 263 - DNA, 28 bp, Glycine max
  source 1..28: mol_type = genomic DNA
cctctacgtacttatttttctagacagg

SEQ ID NO: 264 - DNA, 24 bp, Glycine max
  source 1..24: mol_type = genomic DNA
gttcaggctaaaggctataggcat

SEQ ID NO: 265 - DNA, 24 bp, Glycine max
  source 1..24: mol_type = genomic DNA
attcgtcgactccgatcgaaccct

SEQ ID NO: 266 - DNA, 24 bp, Glycine max
  source 1..24: mol_type = genomic DNA
attctgctctatgagtgggtccca

SEQ ID NO: 267 - DNA, 24 bp, Glycine max
  source 1..24: mol_type = genomic DNA
attctgctattgtcacgggctcac

SEQ ID NO: 268 - DNA, 24 bp, Glycine max
  source 1..24: mol_type = genomic DNA
attcagggtcggcgcccgacaacc

SEQ ID NO: 269 - DNA, 24 bp, Glycine max
  source 1..24: mol_type = genomic DNA
gttcgctatgtgtggccgtaggac

SEQ ID NO: 270 - DNA, 24 bp, Glycine max
  source 1..24: mol_type = genomic DNA
attctaacaatcgccgccgaaatt

SEQ ID NO: 271 - DNA, 24 bp, Glycine max
  source 1..24: mol_type = genomic DNA
gttcctgtgatctcgggcactgcc

SEQ ID NO: 272 - DNA, 24 bp, Glycine max
  source 1..24: mol_type = genomic DNA
gttcgggttgcgactaagattgag

SEQ ID NO: 273 - DNA, 24 bp, Glycine max
  source 1..24: mol_type = genomic DNA
gttcacgactcttggggacattga

SEQ ID NO: 274 - DNA, 24 bp, Glycine max
  source 1..24: mol_type = genomic DNA
attccagatatccggcaatgtcct

SEQ ID NO: 275 - DNA, 24 bp, Glycine max
  source 1..24: mol_type = genomic DNA
attcaatatatccccaaaggcgca

SEQ ID NO: 276 - DNA, 24 bp, Glycine max
  source 1..24: mol_type = genomic DNA
attctaggcagagcgcgcaacggt

SEQ ID NO: 277 - DNA, 24 bp, Glycine max
  source 1..24: mol_type = genomic DNA
attcagcgacccgtacgttgtccc

SEQ ID NO: 278 - DNA, 24 bp, Glycine max
  source 1..24: mol_type = genomic DNA
gttccttccggaagagggcccgca

SEQ ID NO: 279 - DNA, 24 bp, Glycine max
  source 1..24: mol_type = genomic DNA
attcacagcccctagggtgtatac

SEQ ID NO: 280 - DNA, 24 bp, Glycine max
  source 1..24: mol_type = genomic DNA
attcggtggtccaccgaggttaat

SEQ ID NO: 281 - DNA, 24 bp, Glycine max
  source 1..24: mol_type = genomic DNA
attcgagacagaaatctccccctc

SEQ ID NO: 282 - DNA, 24 bp, Glycine max
  source 1..24: mol_type = genomic DNA
gttcacgttatgagttaagacagc

SEQ ID NO: 283 - DNA, 24 bp, Glycine max
  source 1..24: mol_type = genomic DNA
gttctgtctactaaaacgacgtgg

SEQ ID NO: 284 - DNA, 24 bp, Glycine max
  source 1..24: mol_type = genomic DNA
gttcgtcactggcgtatcttattt

SEQ ID NO: 285 - DNA, 24 bp, Glycine max
  source 1..24: mol_type = genomic DNA
gttcgaccgcggtttactccactc

SEQ ID NO: 286 - DNA, 24 bp, Glycine max
  source 1..24: mol_type = genomic DNA
gttccaataaggatcctgactggc

SEQ ID NO: 287 - DNA, 24 bp, Glycine max
  source 1..24: mol_type = genomic DNA
gttctatcgatgcttgaaactcgg

SEQ ID NO: 288 - DNA, 24 bp, Glycine max
  source 1..24: mol_type = genomic DNA
gttcttaggaagtgcacgctatga

SEQ ID NO: 289 - DNA, 24 bp, Glycine max
  source 1..24: mol_type = genomic DNA
attccgggaggggctaagtcccaa

SEQ ID NO: 290 - DNA, 24 bp, Glycine max
  source 1..24: mol_type = genomic DNA
attcaggcatctgacacgtaacag

SEQ ID NO: 291 - DNA, 24 bp, Glycine max
  source 1..24: mol_type = genomic DNA
attctagaattcagcggaggctcc

SEQ ID NO: 292 - DNA, 24 bp, Glycine max
  source 1..24: mol_type = genomic DNA
gttcatacccagtaggatcgaccc

SEQ ID NO: 293 - DNA, 24 bp, Glycine max
  source 1..24: mol_type = genomic DNA
gttcagtcgcattcatttgtgccg

SEQ ID NO: 294 - DNA, 24 bp, Glycine max
  source 1..24: mol_type = genomic DNA
attcaccctggctccaaattggaa

SEQ ID NO: 295 - DNA, 24 bp, Glycine max
  source 1..24: mol_type = genomic DNA
attcactgtcactccaagctgagc

SEQ ID NO: 296 - DNA, 24 bp, Glycine max
  source 1..24: mol_type = genomic DNA
attcctactaatcctttaagacgg

SEQ ID NO: 297 - DNA, 24 bp, Glycine max
  source 1..24: mol_type = genomic DNA
gttcggtagggatgggtaagacaa

SEQ ID NO: 298 - DNA, 24 bp, Glycine max
  source 1..24: mol_type = genomic DNA
gttccgtgtggcagggttgactta

SEQ ID NO: 299 - DNA, 24 bp, Glycine max
  source 1..24: mol_type = genomic DNA
attcctcccggacatacacaatcc

SEQ ID NO: 300 - DNA, 24 bp, Glycine max
  source 1..24: mol_type = genomic DNA
attcgccaaaaggcccgtgaaatt

SEQ ID NO: 301 - DNA, 24 bp, Glycine max
  source 1..24: mol_type = genomic DNA
gttccttgggagtggcatggtcgt

SEQ ID NO: 302 - DNA, 24 bp, Glycine max
  source 1..24: mol_type = genomic DNA
gttccacgtataatattgacgagg

SEQ ID NO: 303 - DNA, 24 bp, Glycine max
  source 1..24: mol_type = genomic DNA
gttcaaggactagagcgcggtgaa

SEQ ID NO: 304 - DNA, 24 bp, Glycine max
  source 1..24: mol_type = genomic DNA
attctctatacaataccaggccag

SEQ ID NO: 305 - DNA, 24 bp, Glycine max
  source 1..24: mol_type = genomic DNA
attcttgagtctcagcgaccgaat

SEQ ID NO: 306 - DNA, 24 bp, Glycine max
  source 1..24: mol_type = genomic DNA
attcggtcgctgagactcaagaat

SEQ ID NO: 307 - DNA, 24 bp, Glycine max
  source 1..24: mol_type = genomic DNA
attctggatagtgagctagggcac

SEQ ID NO: 308 - DNA, 24 bp, Glycine max
  source 1..24: mol_type = genomic DNA
gttcgccaagaaggggaatcggtg

SEQ ID NO: 309 - DNA, 24 bp, Glycine max
  source 1..24: mol_type = genomic DNA
gttcacgggatgtttgtcgcaaca

SEQ ID NO: 310 - DNA, 24 bp, Glycine max
  source 1..24: mol_type = genomic DNA
gttcatcggatgctagtatacctg

SEQ ID NO: 311 - DNA, 24 bp, Glycine max
  source 1..24: mol_type = genomic DNA
attctacatgtccatatgccggag

SEQ ID NO: 312 - DNA, 24 bp, Glycine max
  source 1..24: mol_type = genomic DNA
attcggtgaaatctaactctaagg

SEQ ID NO: 313 - DNA, 24 bp, Glycine max
  source 1..24: mol_type = genomic DNA
attccgatgtggaatgccgatggc

SEQ ID NO: 314 - DNA, 24 bp, Glycine max
  source 1..24: mol_type = genomic DNA
gttcagacaccgtcgcgctcaaca

SEQ ID NO: 315 - DNA, 24 bp, Glycine max
  source 1..24: mol_type = genomic DNA
attccgtagcttgagtcaaagcta

SEQ ID NO: 316 - DNA, 24 bp, Glycine max
  source 1..24: mol_type = genomic DNA
gttcagacgttcctggtgacatac

SEQ ID NO: 317 - DNA, 24 bp, Glycine max
  source 1..24: mol_type = genomic DNA
attctattcgccattctagagagc

SEQ ID NO: 318 - DNA, 24 bp, Glycine max
  source 1..24: mol_type = genomic DNA
attcgacgaaactcaaccactaag

SEQ ID NO: 319 - DNA, 24 bp, Glycine max
  source 1..24: mol_type = genomic DNA
gttcccggattaggcataacccac

SEQ ID NO: 320 - DNA, 24 bp, Glycine max
  source 1..24: mol_type = genomic DNA
gttcgtagcgggtgggttatttgg

SEQ ID NO: 321 - DNA, 24 bp, Glycine max
  source 1..24: mol_type = genomic DNA
gttcggttcgtagcgggtgggtta

SEQ ID NO: 322 - DNA, 24 bp, Glycine max
  source 1..24: mol_type = genomic DNA
gttcggataaaggcgggttcggtt

SEQ ID NO: 323 - DNA, 24 bp, Glycine max
  source 1..24: mol_type = genomic DNA
gttcgatgaacgttcggataaagg

SEQ ID NO: 324 - DNA, 24 bp, Glycine max
  source 1..24: mol_type = genomic DNA
gttcctcgccgaagtcttggggtg

SEQ ID NO: 325 - DNA, 24 bp, Glycine max
  source 1..24: mol_type = genomic DNA
attcccgcccctactttaagtaca

SEQ ID NO: 326 - DNA, 24 bp, Glycine max
  source 1..24: mol_type = genomic DNA
attcaccggtaatccctaccccct

SEQ ID NO: 327 - DNA, 24 bp, Glycine max
  source 1..24: mol_type = genomic DNA
attcgattagaccggctaaaatat

SEQ ID NO: 328 - DNA, 24 bp, Glycine max
  source 1..24: mol_type = genomic DNA
gttcagagaacatagcattacccg

SEQ ID NO: 329 - DNA, 24 bp, Glycine max
  source 1..24: mol_type = genomic DNA
attcgagtgcgtggattaacaact

SEQ ID NO: 330 - DNA, 24 bp, Glycine max
  source 1..24: mol_type = genomic DNA
gttcctaccgtacgtttgatcccc

SEQ ID NO: 331 - DNA, 24 bp, Glycine max
  source 1..24: mol_type = genomic DNA
attcagatggggaaatcgaactgt

SEQ ID NO: 332 - DNA, 24 bp, Glycine max
  source 1..24: mol_type = genomic DNA
gttcgtaccataacgtgggttgtg

SEQ ID NO: 333 - DNA, 24 bp, Glycine max
  source 1..24: mol_type = genomic DNA
attccgatattcacgacttgccct

SEQ ID NO: 334 - DNA, 24 bp, Glycine max
  source 1..24: mol_type = genomic DNA
attcaggcctgtttggcaagagct